(19) United States
(12) Patent Application Publication
(10) Pub. No.: US 2022/0401539 A1
(43) Pub. Date: Dec. 22, 2022

(54) Immunotherapy Targeting Tumor Neoantigenic Peptides

(71) Applicants: Institut Curie, Paris (FR); INSERM (Institut National de la Santé et de la Recherche Médicale), Paris (FR)

(72) Inventors: Olivier Delattre, Paris (FR); Olivier Saulnier, Paris (FR); Joshua Waterfall, Paris (FR); Céline Collin, Paris (FR); Julien Vibert, Saint Cloud (FR); Maud Gautier, Paris (FR)

(73) Assignees: Institut Curie, Paris (FR); Institut National de la Santé et de la Recherche Médicale, Paris (FR)

(21) Appl. No.: 17/770,304

(22) PCT Filed: Oct. 22, 2020
(86) PCT No.: PCT/EP2020/079832

§ 371 Date: Apr. 20, 2022

(30) Foreign Application Priority Data
Oct. 22, 2019 (EP) 19306370.8

(51) Int. Cl. A61K 39/00; C07K 16/32; C07K 14/725; A61P 35/00; G16B 30/20; C07K 14/47

(52) U.S. Cl. CPC A61K 39/001152; C07K 16/32; C07K 14/7051; A61P 35/00; G16B 30/20; C07K 14/4748; A61K 39/001196; A61K 2039/5158; C07K 2319/00; C07K 2317/92; C07K 2317/31

(57) ABSTRACT

The present disclosure relates to a tumor specific neoantigenic peptide, wherein said peptide (i) is encoded by a part of an (ORF) sequence from an unannotated transcript which transcription is positively regulated by an aberrant fusion protein, and (ii) is expressed at a higher level or frequency in a sample from said tumor compared to normal tissue sample. The present disclosure also relates to vaccine or immunogenic composition, antibodies and immune cells derived thereof and their use in therapy of cancer.

### FIELD OF THE DISCLOSURE

[0001] The present disclosure provides neoantigenic peptides encoded by a part of an (ORF) sequence from a transcript which transcription is regulated by an aberrant fusion transcription factor, such as the EWS-FLIT fusion protein, as well as nucleic acids, vaccines, antibodies and immune cells that can be used in cancer therapy.

### BACKGROUND

[0002] Harnessing the immune system to generate effective responses against tumors is a central goal of cancer immunotherapy. Part of the effective immune response involves T lymphocytes specific for tumor antigens. T cell activation requires their interaction with antigen-presenting cells (APCs), commonly dendritic cells (DCs), expressing TCR-cognate peptides presented in the context of a major histocompatibility molecule (MHC) and co-stimulation signals. Subsequently, activated T cells can recognize peptide-MHC complexes presented by all cell types, even malignant cells. Neoplasms often contain infiltrating T lymphocytes reactive with tumor cells.

[0003] However, the efficiency of immune responses against tumors is severely dampened by various immunosuppressive strategies developed by tumors; e.g, tumor cells express receptors that provide inhibitory signals to infiltrating T cells, or they secrete inhibitory cytokines. The development of checkpoint blockade therapy has provided means to bypass some of these mechanisms, leading to more efficient killing of cancer cells. The promising results yielded by this approach have opened new avenues for the development of T cell-based immunotherapy. Checkpoint inhibitors are, however, effective in a minority of patients and only in limited types of cancer.

[0004] A major goal in immunotherapy is to increase the proportion of responding patients and extend the cancer indications. Vaccination, administration of anti-tumor antibodies, or administration of immune cells specific for tumor antigens have all been proposed to increase the anti-tumor immune response, and can be administered alone, with other therapies such as chemotherapy or radiation, or as a combination therapy with checkpoint blockers. The selection of antigens able to trigger anti-tumor immunity without targeting healthy tissues has been a long-standing challenge.

[0005] Cancers are frequently characterized by abnormal transcription factors as a result of point mutation or gene fusion. These altered transcription factors may thus have gain-of-function, neomorphic DNA binding properties which lead to aberrant transcriptional activities which may impact tumor development/progression.

[0006] In particular, Ewing sarcoma is an aggressive tumor which mostly occurs in teenagers and young adults and which prognosis is still detrimental particularly in metastatic form of the disease or at relapse. It is characterized by specific gene fusions between members of the FET (FUS/TLS, EWS, TAF15) family of RNA binding proteins and members of the ETS family of transcription factors. The most frequent fusion is between EWS and FLI1.

[0007] The search for tumor neoantigens has mostly been focused on mutated sequences appearing as in cancer cells. These antigens are unique to each patient. Tumor antigens (the ones preferentially expressed in tumor cells) are, however, self-antigens that represent poor targets for vaccination (probably due to central tolerance). Identifying shared true neoantigens (absent from tissues) is a major challenge for the field.

[0008] New tumor neoantigens would be of interest and might improve or reduce the cost of cancer therapy in particular in the case of vaccination and adoptive cell therapy.

### SUMMARY

[0009] The present disclosure provides a method for identifying cancer specific neoantigenic peptides which comprises:
[0010] i. identifying transcripts from one or more samples isolated from a tumor driven by a fusion protein, notably a transcription factor fusion, obtained from one or more subjects,
   [0011] a. which transcription is specifically positively regulated by said fusion protein,
   [0012] b. which are specifically associated with the fusion tumor (e.g., the transcription factor fusion-driven tumor), and optionally
   [0013] c. which are encoded by neogenes originating from intergenic regions or intronic; and
[0014] ii. identifying among the transcripts identified at step (i) open reading frame (ORF) sequences, wherein typically said ORF sequences are expressed at higher level or frequency in a sample from said tumor as compared to a normal tissue sample.

[0015] In some embodiments, the fusion protein is a transcription factor fusion. Typically, said transcription factor fusion is encoded by a fusion gene selected from any one of PAX3-FOXO1, PAX7-FOXO1, ASPSCR1-TFE3, AHRR-NCOA2, EWSR1-CREB1, EWSR1-ATF1, FUS-ATF1, EWSR1-CREB1, COL1A1-PDGFB, EWSR1-WT1, WWTR1-CAMTA1, TFE3-YAP1, EWSR1-FLI1, EWSR1-ERG, EWSR1 fusion with various ETS partners such as ETV1 FEV and ETV4, FUS-ERG, EWSR1-NFATC2, CIC-DUX4, BCOR-CCNB3, EWSR1-NR4A3, TAF15-NR4A3, TCF12-NR4A3, TFG-NR4A3, ETV6-NTRK3, ALK-TPM4, ALK-TPM3, ALK-CLTC, ALK-RANBP2, ALK-ATIC, ALK-SEC31A, ALK-CARS, PLAF fusions, HMGA2 fusions, HMGA1 fusions, C-MKL2, f95-MKL2, FUS-CREB3L2, EWSR1-ZNF444, EWSR1-PBX1, EWSR1-POU5F1, FUS-DDIT3, EWSR1-DDIT3, EWS-CHOP, EWS-CHN, TGFBR3-MGEA5, TGFBR3-MGEA5, MYH9-USP6, PHF1 fusions, ACTB-GLI1, FUS-CREB3L1, NAB2-STAT6, NCOA2-SRF, NCOA2-TEAD1, SS18-SSX1, SS18-SSX2, SS18-SSX4, and CSF1-COL6A3. In more specific embodiments, the transcription factor fusion is encoded by an EWS (EWSR1) fusion gene (as defined notably in table 1 herein).

[0016] More specifically, the present disclosure provides a method for identifying Ewing-sarcoma specific neoantigenic peptides which comprises:
[0017] i. identifying unannotated transcripts among long read sequencing from one or more samples isolated from an Ewing Sarcoma tumor obtained from one or more subjects, which transcription is positively regulated by the EWS-FLI1 fusion protein or negatively regulated upon the EWS-FLI1 fusion protein depletion, and typically wherein the transcripts have no match on normal reference transcriptome;
[0018] ii. identifying among the unannotated transcripts of step (i) open reading frame (ORF) sequences, wherein said ORF sequences are expressed at higher level or frequency in an Ewing sarcoma sample as compared to a normal tissue sample.

[0019] The present disclosure also provides a tumor specific neoantigenic peptide, wherein the tumor is associated with a fusion protein and typically a transcription factor fusion, and wherein said peptide:
[0020] is encoded by a part of an (ORF) sequence from an unannotated transcript which transcription is positively regulated by said fusion protein (or in other words which transcription is negatively regulated upon said fusion protein depletion), and
[0021] is expressed at a higher level or frequency in a sample from said tumor compared to a normal tissue sample.

[0022] In some embodiments, the fusion protein is a transcription factor fusion which can be encoded by a fusion gene selected from any one of PAX3-FOXO1, PAX7-FOXO1, ASPSCR1-TFE3, AHRR-NCOA2, EWSR1-CREB1, EWSR1-ATF1, FUS-ATF1, EWSR1-CREB1, COL1A1-PDGFB, EWSR1-WT1, WWTR1-CAMTA1, TFE3-YAP1, EWSR1-FLI1, EWSR1-ERG, EWSR1 fusion with various ETS partners such as ETV1 FEV and ETV4, FUS-ERG, EWSR1-NFATC2, CIC-DUX4, BCOR-CCNB3, EWSR1-NR4A3, TAF15-NR4A3, TCF12-NR4A3, TFG-NR4A3, ETV6-NTRK3, ALK-TPM4, ALK-TPM3, ALK-CLTC, ALK-RANBP2, ALK-ATIC, ALK-SEC31A, ALK-CARS, PLAF fusions, HMGA2 fusions, HMGA1 fusions, C-MKL2, f95-MKL2, FUS-CREB3L2, EWSR1-ZNF444, EWSR1-PBX1, EWSR1-POU5F1, FUS-DDIT3, EWSR1-DDIT3, EWS-CHOP, EWS-CHN, TGFBR3-MGEA5, TGFBR3-MGEA5, MYH9-USP6, PHF1 fusions, ACTB-GLI1, FUS-CREB3L1, NAB2-STAT6, NCOA2-SRF, NCOA2-TEAD1, SS18-SSX1, SS18-SSX2, SS18-SSX4, and CSF1-COL6A3. In more specific embodiments, the fusion gene is an EWS (EWSR1) fusion gene as mentioned above or in the table 1 herein.

[0023] The present disclosure also encompasses a tumor specific neoantigenic peptide, wherein said tumor is associated with a fusion protein, notably a transcription factor fusion, and wherein said peptide
[0024] i) is encoded by a part of an (ORF) sequence from a neotranscript characterized in that:
   [0025] a. its expression is regulated by said fusion protein, as evidenced by expression in cell line wherein the expression of said fusion protein is made inducible,
   [0026] b. it is specifically associated with the fusion-driven tumor,
   [0027] c. optionally it is encoded by genome regions having binding motifs involved in promoter regulation, such as poly GGAA binding sites, and/or having binding sites for said transcription factor as determined by ChIP-seq experiments and/or histone marks activation, such as H3K27ac and H3K4me3 histone, at less than 5 kb of the TSS, and/or
   [0028] d. optionally it is encoded by intergenic or intronic regions of the genome;
[0029] ii) is expressed at a higher level or frequency in a sample from said tumor compared to normal tissue sample.

[0030] The present disclosure further provides an Ewing-sarcoma specific neoantigenic peptide, wherein said peptide:
[0031] is encoded by a part of an (ORF) sequence from a transcript
   [0032] which transcription is positively regulated by the EWS-FLI1 fusion protein (or in other words which transcription is negatively regulated upon the EWS-FLI1 fusion protein depletion), is specifically associated with the fusion-driven tumor type,
   [0033] optionally is encoded by genome regions having poly GGAA binding sites and/or histone marks activation, such as H3K27ac and H3K4me3 histone at no more than 500 bp of the TSS, and/or
   [0034] optionally it is encoded by intergenic or intronic regions of the genome.
      and
[0035] is expressed at a higher level or frequency in an Ewing sarcoma sample compared to normal tissue sample.

[0036] In one embodiment, the tumor neoantigenic peptide is 8 or 9 amino acids long, notably 8 to 11, and binds to at least one MHC class I molecule of said subject.

[0037] In another embodiment, the tumor neoantigenic peptide is from 13 to 25 amino acids long, and binds to at least one MHC class II molecule of said subject.

[0038] The present disclosure also encompasses peptides obtainable by the method as herein disclosed.

[0039] More particularly, the present disclosure provides Ewing sarcoma neoantigenic peptides, comprising at least 8 amino acids and encoded by an open reading frame (ORF) selected from the group comprising SEQ ID NO: 1-145 and the transcripts identified in table 9; optionally wherein the neoantigenic peptides are of SEQ ID NO:166-201.

[0040] Said neoantigenic peptides are typically expressed at higher levels, or higher frequency, in tumor cells (e.g., Ewing sarcoma cells) compared to normal healthy cells, optionally wherein said neoantigenic peptides are not expressed, or not detectably expressed in normal healthy cells.

[0041] In some embodiments said neoantigenic peptides are expressed in at least at least 5%, 6%, 7%, 8%, 9%, 10%, 15%, 20%, 25%, 30%, 40%, 50%, 60%, 70%, 80%, 90%, 95%, or even 99% of a population of subjects suffering from a cancer, notably from a bone or soft tissue tumor and more specifically from a population of subjects suffering from Ewing sarcoma.

[0042] Typically, the neoantigenic peptides bind MEW class I or class II with a binding affinity Kd of less than about 10⁻⁴, 10⁻⁵, 10⁻⁶, 10⁻⁷, 10⁻⁸ or 10⁻⁹ M (lower numbers indicating higher binding affinity).

[0043] The present disclosure also encompasses:
[0044] a population of autologous dendritic cells or antigen presenting cells that have been pulsed with one or more of the peptides as herein defined, or transfected with a polynucleotide encoding one or more of the peptides as herein described;
[0045] a vaccine or immunogenic composition, notably a sterile vaccine or immunogenic composition, capable of raising a specific T-cell response comprising
   [0046] a. one or more neoantigenic peptides as herein defined,
   [0047] b. one or more polynucleotides encoding a neoantigenic peptide as herein defined, optionally wherein the one or more polynucleotides are linked to a heterologous regulatory control nucleotide sequence; or
   [0048] c. a population of autologous dendritic cells or antigen presenting cells (notably artificial APC) that have been pulsed or loaded with one or more of the peptides as herein defined,
[0049] optionally in combination with a physiologically acceptable buffer, carrier, excipient, immunostimulant and/or adjuvant.
[0050] an antibody, or an antigen-binding fragment thereof, a T cell receptor (TCR), or a chimeric antigen receptor (CAR) that binds a neoantigenic peptide as herein defined, or a composition comprising thereof.
[0051] a polynucleotide encoding a neoantigenic peptide, an antibody, a CAR or a TCR as herein defined, typically operatively linked to a heterologous regulatory control nucleotide sequences, and a vector encoding such polynucleotide, or a vaccine or immunogenic composition comprising thereof, notably such polynucleotide or vector;
[0052] an immune cell, or a population or immune cells that targets one or more neoantigenic peptides, as herein defined, wherein the population of immune cells preferably targets a plurality of different tumor neoantigenic peptides as herein disclosed, or a composition comprising thereof.

[0053] Typically, the antibody or antigen-binding fragment thereof, TCR or CAR binds a neoantigenic peptide, optionally in association with an MEW molecule, with a K_{d} affinity of about 10⁻⁶ M or less.

[0054] In some embodiments, the T cell receptor can be made soluble and fused to an antibody fragment directed to a T cell antigen, optionally wherein the targeted antigen is CD3 or CD16.

[0055] In some embodiments, the antibody can be a multispecific antibody that further targets at least an immune cell antigen, optionally wherein the immune cell is a T cell, a NK cell or a dendritic cell, optionally wherein the targeted antigen is CD3, CD16, CD30 or a TCR. In any of the embodiments relating to an antibody, the antibody can be fusion, humanized, or human, and may be IgG, e.g. IgG1, IgG2, IgG3, IgG4.

[0056] The immune cell can be typically a T cell or a NK cell, a CD4+ and/or CD8+ cell, a TILs/tumor derived CD8 T cells, a central memory CD8+ T cells, a Treg, a MAIT, or a Yδ T cell. The cell can also be autologous or allogenic.

[0057] The T cell can comprises a recombinant antigen receptor selected from T cell receptor and chimeric antigen receptor as herein defined, wherein the antigen is a tumor neoantigenic receptor as herein disclosed.

[0058] The present disclosure also encompasses a method of producing an antibody, TCR or CAR that specifically binds a neoantigenic peptide as herein defined comprising the step of selecting an antibody, TCR or CAR that binds to a tumor neoantigen peptide of the present disclosure, optionally in association with an MEW or HLA molecule, with a K_{d} binding affinity of about 10⁻⁶ M or less. Antibodies, TCRs and CARs selected by said method are also part of the present application.

[0059] A polynucleotide encoding a neoantigenic peptide as herein defined, or an antibody, a CAR or a TCR as herein defined, optionally linked to a heterologous regulatory control sequence are also part of the present application.

[0060] As per the present disclosure, the neoantigenic peptide, the population of dendritic cells, the vaccine or immunogenic composition, the polynucleotide or the vector encoding the peptide can be used in cancer vaccination therapy of a subject; or for treating cancer in a subject suffering from cancer or at risk of cancer; or can be used for inhibiting proliferation of cancer cells. Typically, the peptide(s) bind at least one MHC molecule of said subject.

[0061] As per the present disclosure, the antibody or the antigen-binding fragment thereof, the multispecific antibody, the TCR, the CAR, the polynucleotide, or the vector encoding such antibody, TCR or CAR, as herein defined can be used in the treatment of cancer in a subject in need thereof, typically in a subject suffering from cancer or at risk of cancer, or can be used for inhibiting proliferation of cancer cells.

[0062] Still as per the present disclosure, the population of immune cells as herein defined can be used in cell therapy of a subject suffering from cancer or at risk of cancer, or can be used for inhibiting proliferation of cancer cells.

[0063] Typically, as per the present application, the cancer is Ewing sarcoma. Particularly, the various cancer therapies, or cancer therapeutic products of the present application (e.g., the neoantigenic peptide, the population of dendritic cells, the vaccine or immunogenic composition, the polynucleotide or the vector encoding the peptide, the antibody or the antigen-binding fragment thereof, the multispecific antibody, the TCR, the CAR, the polynucleotide, or the vector encoding such antibody, TCR or CAR or the population of immune cells (collectively referenced herein as the “Cancer Therapeutic Products”) are used in the treatment of a subject who is suffering from Ewing sarcoma or who is at risk of suffering from Ewing sarcoma.

[0064] Pharmaceutical compositions comprising any of the foregoing, optionally with a sterile pharmaceutically acceptable excipient(s), carrier, and/or buffer are also contemplated as well as methods of using them.

[0065] In any of the embodiments described herein, the cancer therapeutic products, as herein disclosed, can be administered in combination with at least one further therapeutic agent. Such further therapeutic agent can typically be a chemotherapeutic agent, or an immunotherapeutic agent.

[0066] For example, according to the present disclosure, any of the Cancer Therapeutic Products can be administered in combination with an anti-immunosuppressive/immunostimulatory agent. For example, the subject is further administered one or more checkpoint inhibitors typically selected from PD-1 inhibitors, PD-L1 inhibitors, Lag-3 inhibitors, Tim-3 inhibitors, TIGIT inhibitors, BTLA inhibitors, V-domain Ig suppressor of T-cell activation (VISTA) inhibitors and CTLA-4 inhibitors, IDO inhibitors.

[0067] Various embodiments of the methods, neoantigenic peptides and Cancer Therapeutic Products are described in detailed below. Except for alternatives clearly mentioned, combinations of such embodiments are encompassed by the present application.

### DETAILED DISCLOSURE

[0068] In contrast to the wild-type FLI1, the chimeric EWS-FLI1 has gain-of-function activities and, in particular, the ability to bind GGAA microsatellite sequences in the genome. It thus creates neomorphic enhancer regions that can interact with neighboring promoters and activate corresponding genes.

[0069] EWS-FLI1 can, not only activate known genes, but also lead to transcription activation of otherwise transcriptionally silent genome regions (in normal cells or tissues as compared to transcription factor fusion drive-tumors) generating neomorphic genes, also named “neogenes” or “new genes”. Such neogenes, or new genes, typically originate from intergenic or intronic regions of the genome and encode for neo-transcripts and have thus a standard gene structure (i.e. they contain exonic and intronic regions and they can be alternatively spliced and polyadenylated) and are typically not annotated in public databases, such as the public EBI (European Bioinformatic Institute) databases which reference is Ensembl database (https://www.ensembl.org/index.html) or the expression atlas, or the NCBI public databases such as the RefSeq (https://www.ncbi.nlm.nih.gov/refseq/about/) or GEO (https://www.ncbi.nlm.nih.gov/geo/) databases. Other databases can be used such as the GTEX database (https://gtexportal.org/home/). The neotranscripts encoded by this neogenes are thus typically unannotated in such public databases.

[0070] This mechanism is further shown, in the results included herein, to be prevalent in diverse transcription factor fusion-driven cancers, also generating tumor-specific neogenes in other tumor types such as alveolar rhabdomyosarcoma and desmoplastic small round cell tumor, driven by PAX-FOXO and EWS-WT1 (or EWSR1-WT1) chimeric fusion proteins respectively. Tumor-specific neogenes have thus also found in 16 additional fusion-driven cancers. Importantly, this observation in 19 transcription factor fusion-driven cancers can be applied to the hundreds of human cancers that are characterized by transcription factor fusions.

[0071] This finding has significant implications both for diagnosis of such tumor types as well as identifying potential therapeutic targets. Indeed, the inventors now provide demonstration that peptides encoded by the putative open reading frames of these neo-transcripts can be recognized by naïve T-cells from controls.

[0072] This discovery first provides tumor-specific biomarkers that can discriminate between tumors, for example that allows to discriminate Ewing sarcoma from other tumors, particularly from other sarcomas. Second, such neopeptides can lead to the expression of tumor-specific peptides, the presentation of which in an MHC-Class1 context can lead to a specific immune response thus constituting the basis for tumor-directed immunotherapies such as vaccination, development of neo-peptide specific antibodies or cytotoxic T-cell-based therapies.

[0073] The presently defined neoantigenic peptides are also expected to be highly immunogenic as they are derived from sequences absent from normal cells. Thus, the peptides of the present disclosure are expected to exhibit very low immunological tolerance.

[0074] The present disclosure also allows selecting peptides having shared tumor neoepitopes among a population of patients. Such shared tumor peptides are of high therapeutic interest since they may be used in immunotherapy for a large population of patients.

### Definitions

[0075] The term “fusion gene” as used herein is a hybrid or chimeric gene formed from two previously independent genes. It can occur as a result of translocation, interstitial deletion, or chromosomal inversion. Such fusion genes have been found to be prevalent in all main types of human tumors (Mitelman, F., Johansson, B. & Mertens, F. The impact of translocations and gene fusions on cancer causation. Nat Rev Cancer 7, 233-245 (2007)) and dan thus also be named oncogenic gene fusion. For example, the Ewing sarcoma is characterized by the reciprocal chromosomal translocation generating a fusion oncogene between the EWS gene (also named EWSR1) involved in various cellular processes, including gene expression, cell signaling, and RNA processing and transport, and an Ets family transcription factor, most commonly FLI-1. As used herein a transcription factor fusion is encoded by a fusion gene involving a gene coding for a transcription factor.

[0076] According to the present disclosure, the term “disease” refers to any pathological state, including cancer diseases, in particular those forms of cancer diseases described herein.

[0077] The term “normal” refers to the healthy state or the conditions in a healthy subject or tissue, i.e., non-pathological conditions, wherein “healthy” preferably means non-cancerous.

[0078] Cancer (medical term: malignant neoplasm) is a class of diseases in which a group of cells display uncontrolled growth (division beyond the normal limits), invasion (intrusion on and destruction of adjacent tissues), and sometimes metastasis (spread to other locations in the body via lymph or blood). These three malignant properties of cancers differentiate them from benign tumors, which are self-limited, and do not invade or metastasize. Most cancers form a tumor but some, like leukemia, do not.

[0079] Malignant tumor is essentially synonymous with cancer. Malignancy, malignant neoplasm, and malignant tumor are essentially synonymous with cancer.

[0080] As used herein, the term “tumor” or “tumor disease” refers to an abnormal growth of cells (called neoplastic cells, tumorigenous cells or tumor cells) preferably forming a swelling or lesion. By “tumor cell” is meant an abnormal cell that grows by a rapid, uncontrolled cellular proliferation and continues to grow after the stimuli that initiated the new growth cease. Tumors show partial or complete lack of structural organization and functional coordination with the normal tissue, and usually form a distinct mass of tissue, which may be either benign, pre-malignant or malignant.

[0081] A benign tumor is a tumor that lacks all three of the malignant properties of a cancer. Thus, by definition, a benign tumor does not grow in an unlimited, aggressive manner, does not invade surrounding tissues, and does not spread to non-adjacent tissues (metastasize).

[0082] Neoplasm is an abnormal mass of tissue as a result of neoplasia. Neoplasia (new growth in Greek) is the abnormal proliferation of cells. The growth of the cells exceeds, and is uncoordinated with that of the normal tissues around it. The growth persists in the same excessive manner even after cessation of the stimuli. It usually causes a lump or tumor. Neoplasms may be benign, pre-malignant or malignant.

[0083] “Growth of a tumor” or “tumor growth” according to the present disclosure relates to the tendency of a tumor to increase its size and/or to the tendency of tumor cells to proliferate.

[0084] For purposes of the present disclosure, the terms “cancer” and “cancer disease” are used interchangeably with the terms “tumor” and “tumor disease”.

[0085] Cancers are classified by the type of cell that resembles the tumor and, therefore, the tissue presumed to be the origin of the tumor. These are the histology and the location, respectively.

[0086] The term “cancer” according to the disclosure comprises leukemias, seminomas, melanomas, teratomas, lymphomas, neuroblastomas, gliomas, sarcomas, rectal cancer, endometrial cancer, kidney cancer, adrenal cancer, thyroid cancer, blood cancer, skin cancer, cancer of the brain, cervical cancer, intestinal cancer, liver cancer, colon cancer, stomach cancer, intestine cancer, head and neck cancer, gastrointestinal cancer, lymph node cancer, esophagus cancer, colorectal cancer, pancreas cancer, ear, nose and throat (ENT) cancer, breast cancer, prostate cancer, cancer of the uterus, ovarian cancer and lung cancer, soft tissue tumors and the metastases thereof. The term cancer according to the present disclosure also comprises cancer metastases and relapse of cancer.

[0087] Soft tissues include tendons, ligaments, fascia, skin, fibrous tissues, fat, and synovial membranes (which are connective tissue), and muscles, nerves and blood vessels (which are not connective tissue).

[0088] A “sarcoma” is a cancer that arises from transformed cells of mesenchymal (i.e., connective tissue) origin (see Yang J et al., October 2014 “The role of mesenchymal stem/progenitor cells in sarcoma: update and dispute”. Stem Cell Investigation; and Tobias J 2015 “Cancer and its Management” Seventh Edition. Chichester, West Sussex, P0198SQ, UK: John Wiley & Sons, Ltd. p. 446). Connective tissue is a broad term that includes bone, cartilage, fat, vascular, or hematopoietic tissues, and sarcomas can arise in any of these types of tissues. As a result, there are many subtypes of sarcoma, which are classified based on the specific tissue and type of cell from which the tumor originates (Amin M B 2017 AJCC “Cancer Staging Manual”, Eight Edition. Chicago, Ill. 60611, USA: Springer International Publishing AG Switzerland. pp. 471-548). Sarcomas are notably primary connective tissue tumors, meaning that they arise in connective tissues. An example of bone sarcoma is notably the Ewing sarcoma.

[0089] Typically, the cancers as per the present disclosure are associated with or driven by the expression of an aberrant transcription factor, also named herein transcription factor chimeric fusion or more shortly transcription factor fusion, having gain of function activity. Such transcription factor fusions are encoded by fusion genes (typically oncogenic fusion genes) involving fusion with a gene coding for a transcription factor. Example of such transcription factor fusions notably include those encoded by any one of the gene selected from PAX-FOXO fusions, such as PAX3-FOXO1, PAX7-FOXO1, ASPSCR1-TFE3, AHRR-NCOA2, fusion between the FET family of RNA-binding proteins (including the FUS, EWS and TAF15 proteins) and the ETS family of transcriptions factors (E26 transformation-specific or E-twenty-six, or Erythroblast Transformation Specific), such as EWSR1-CREB1, EWSR1-ATF1, FUS-ATF1, EWSR1-CREB1, COL1A1-PDGFB, EWSR1-WT1, WWTR1-CAMTA1, TFE3-YAP1, EWSR1-FLI1, EWSR1-ERG, EWSR1 fusion with various ETS partners such as ETV1, FEV and ETV4, FUS-ERG, EWSR1-NFATC2, CIC-DUX4, BCOR-CCNB3, EWSR1-NR4A3, EWSR1-PATZ1, TAF15-NR4A3, TCF12-NR4A3, TFG-NR4A3, ETV6-NTRK3, ALK-TPM4, ALK-TPM3, ALK-CLTC, ALK-RANBP2, ALK-ATIC, ALK-SEC31A, ALK-CARS, PLAF fusions, HMGA2 fusions, HMGA1 fusions, C-MKL2, f95-MKL2, FUS-CREB3L2, EWSR1-ZNF444, EWSR1-PBX1, EWSR1-POU5F1, FUS-DDIT3, EWSR1-DDIT3, EWS-CHOP, EWS-CHN, TGFBR3-MGEA5, TGFBR3-MGEA5, MYH9-USP6, PHF1 fusions, ACTB-GLI1, FUS-CREB3L1, NAB2-STAT6, NCOA2-SRF, NCOA2-TEAD1, SS18-SSX1, SS18-SSX2, SS18-SSX4, and CSF1-COL6A3. In some embodiments of the present disclosure, the transcription factor fusions are selected from PAX-FOXO, EWSR1-WT1 and EWSR1-FLI1 fusions (it is to be noted that EWSR1 can also be abbreviated in EWS).

[0090] In some embodiments of the present disclosure the term cancer include mesenchymatous tumors such as bone and soft tissue tumors or sarcomas, notably Alveolar rhabdomyosarcoma, Alveolar soft part sarcoma, Angiofibroma, Angiomatoid fibrous histiocytom, Clear cell sarcoma, extraskeletal myxoid chondrosarcoma (emCS), Dermatofibrosarcoma protuberans/giant cell fibroblastoma, Desmoplastic small round cell tumor, Epithelioid hemangioendothelioma, Ewing sarcoma, Ewing sarcoma-like such as EWSR1-NFATC2 sarcoma (NFAT), CIC-fused sarcoma (such as CIC-DUX4 sarcoma), EWSR1-PATZ1 sarcoma (PATZ1), or BCOR-rearranged sarcoma (BCOR-SSNB3 sarcoma), Infantile fibrosarcoma, inflammatory myofibroblastic tumor (TMFI), lipoblastoma, Lipoma, ordinary, Lipoma, chondroid, Low-grade fibromyxoid sarcoma, Mesenchymal chondrosarcoma (MCS), midline carcinoma (Midline), Myoepithelioma, soft tissue, Myxoid/round cell liposarcoma, Myxoinflammatory fibroblastic sarcoma/hemosiderotic fibrolipomatous tumor, Nodular fasciitis, Ossifying fibromyxoid tumor, pericytoma, myxoid liposarcoma (mLPS), solitary fibrous tumor (SFT), synovial sarcoma (SS), TFE3 renal cell carcinoma (TFE3, Sclerosing epithelioid fibrosarcoma, Spindle cell rhabdomyosarcoma, Solitary fibrous tumor, Tenosynovial giant cell tumor,

[0091] In some embodiments, the cancer is selected from Ewing sarcoma (Ew), alveolar rhabdomyosarcoma (aRMS), desmoplastic small round cell tumor (DSRCT), clear cell sarcoma (CCS), Ewing sarcoma-like such as EWSR1-NFATC2 sarcoma (NFAT), BCOR-rearranged sarcoma (BCOR-SSNB3), or CIC-fused sarcoma (CIC), such as CIC-DUX4 sarcoma synovial sarcoma (SS), angiomatoid fibrous histiocytoma (AFH), alveolar soft part sarcoma (ASPS), extraskeletal myxoid chondrosarcoma (emCS), low-grade fibromyxoid sarcoma (LGFS), mesenchymal chondrosarcoma (MCS), midline carcinoma (Midline), myxoid liposarcoma (mLPS), EWSR1-PATZ1 sarcoma (PATZ1), solitary fibrous tumor (SFT), TFE3 renal cell carcinoma (TFE3), and inflammatory myofibroblastic tumor (TMFI).

[0092] A “Neogene” or a “new gene”, as herein intended, corresponds to a region of the genome which is transcriptionally silent in normal cell or tissue, but which transcription is induced by a transcription factor fusion typically in a cancer cell wherein the cancer is driven by said transcription factor fusion. Neogenes, or new genes typically correspond to intergenic or intronic regions of the genome. A Neogene from a cancer cell as above defined therefore encodes a “neotranscript”, which is unannotated in a database referencing the transcriptome data of the corresponding normal cell from the same organism.

[0093] By “metastasis” is meant the spread of cancer cells from its original site to another part of the body. The formation of metastasis is a very complex process and depends on detachment of malignant cells from the primary tumor, invasion of the extracellular matrix, penetration of the endothelial basement membranes to enter the body cavity and vessels, and then, after being transported by the blood, infiltration of target organs. Finally, the growth of a new tumor, i.e. a secondary tumor or metastatic tumor, at the target site depends on angiogenesis.

[0094] Tumor metastasis often occurs even after the removal of the primary tumor because tumor cells or components may remain and develop metastatic potential. In one embodiment, the term “metastasis” according to the present disclosure relates to “distant metastasis” which relates to a metastasis which is remote from the primary tumor and the regional lymph node system.

[0095] A relapse or recurrence occurs when a person is affected again by a condition that affected them in the past. For example, if a patient has suffered from a tumor disease, has received a successful treatment of said disease and again develops said disease said newly developed disease may be considered as relapse or recurrence. However, according to the present disclosure, a relapse or recurrence of a tumor disease may but does not necessarily occur at the site of the original tumor disease. Thus, for example, if a patient has suffered from ovarian tumor and has received a successful treatment a relapse or recurrence may be the occurrence of an ovarian tumor or the occurrence of a tumor at a site different to ovary. A relapse or recurrence of a tumor also includes situations wherein a tumor occurs at a site different to the site of the original tumor as well as at the site of the original tumor. Preferably, the original tumor for which the patient has received a treatment is a primary tumor and the tumor at a site different to the site of the original tumor is a secondary or metastatic tumor.

[0096] By “treat” is meant to administer a compound or composition as described herein to a subject in order to prevent or eliminate a disease, including reducing the size of a tumor or the number of tumors in a subject; arrest or slow a disease in a subject; inhibit or slow the development of a new disease in a subject; decrease the frequency or severity of symptoms and/or recurrences in a subject who currently has or who previously has had a disease; and/or prolong, i.e. increase the lifespan of the subject. In particular, the term “treatment of a disease” includes curing, shortening the duration, ameliorating, preventing, slowing down or inhibiting progression or worsening, or preventing or delaying the onset of a disease or the symptoms thereof.

[0097] By “being at risk” is meant a subject, i.e. a patient, that is identified as having a higher than normal chance of developing a disease, in particular cancer, compared to the general population. In addition, a subject who has had, or who currently has, a disease, in particular cancer, is a subject who has an increased risk for developing a disease, as such a subject may continue to develop a disease. Subjects who currently have, or who have had, a cancer also have an increased risk for cancer metastases.

[0098] The therapeutically active agents or product, vaccines and compositions described herein may be administered via any conventional route, including by injection or infusion.

[0099] The agents described herein are administered in effective amounts. An “effective amount” refers to the amount which achieves a desired reaction or a desired effect alone or together with further doses. In the case of treatment of a particular disease or of a particular condition, the desired reaction preferably relates to inhibition of the course of the disease. This comprises slowing down the progress of the disease and, in particular, interrupting or reversing the progress of the disease. The desired reaction in a treatment of a disease or of a condition may also be delay of the onset or a prevention of the onset of said disease or said condition. An effective amount of an agent described herein will depend on the condition to be treated, the severity of the disease, the individual parameters of the patient, including age, physiological condition, size and weight, the duration of treatment, the type of an accompanying therapy (if present), the specific route of administration and similar factors. Accordingly, the doses administered of the agents described herein may depend on several of such parameters. In the case that a reaction in a patient is insufficient with an initial dose, higher doses (or effectively higher doses achieved by a different, more localized route of administration) may be used.

[0100] The pharmaceutical compositions as herein described are preferably sterile and contain an effective amount of the therapeutically active substance to generate the desired reaction or the desired effect.

[0101] The pharmaceutical compositions as herein described are generally administered in pharmaceutically compatible amounts and in pharmaceutically compatible preparation. The term “pharmaceutically compatible” refers to a nontoxic material which does not interact with the action of the active component of the pharmaceutical composition. Preparations of this kind may usually contain salts, buffer substances, preservatives, carriers, supplementing immunity-enhancing substances such as adjuvants, e.g. CpG oligonucleotides, cytokines, chemokines, saponin, GM-CSF and/or RNA and, where appropriate, other therapeutically active compounds. When used in medicine, the salts should be pharmaceutically compatible.

[0102] A “transcript” as herein intended is a messenger RNA (or mRNA) or a part of a mRNA which is expressed by an organism, notably in a particular tissue or even in a particular tissue. Expression of a transcript varies depending on many factors. In particular expression of a transcript may be modified in a cancer cell. Typically in a transcription factor fusion-driven tumor cell or tissue sample, expression of a transcript specifically associated to said transcription factor fusion-driven tumor is increased, as compared to any other sample (from another tumor cell or tissue, or from a normal healthy cell or tissue).

[0103] A “representative genome” (also known as reference genome or assembly) is a digital nucleic acid sequence database, assembled by scientists as a representative example of species set of genes. As they are often assembled from the sequencing of DNA from a number of donors, reference genomes do not accurately represent the set of genes of any single individual (animal or person). Instead a reference provides a haploid mosaic of different DNA sequences from each donor.

[0104] A “transcriptome” as herein intended is the full range of messenger RNA, or mRNA, molecules expressed by an organism. The term “transcriptome” can also be used to describe the array of mRNA transcripts produced in a particular cell or tissue type. In contrast with the genome, which is characterized by its stability, the transcriptome actively changes. In fact, an organism's transcriptome varies depending on many factors, including stage of development and environmental conditions. Typically, the transcriptome as herein intended is the human transcriptome.

[0105] A “normal representative transcriptome” is a digital database of mRNA in healthy subject, or tissue(s).

[0106] A reading frame is a way of dividing the sequence of nucleotides in a nucleic acid (DNA or RNA) molecule into a set of consecutive, non-overlapping triplets.

[0107] An open reading frame (ORF) is the part of a reading frame that has the ability to be translated. An ORF is a continuous stretch of codons that contain a start codon (usually AUG) at a transcription starting site (TSS) and a stop codon (usually UAA, UAG or UGA). An ATG codon within the ORF (not necessarily the first) may indicate where translation starts. The transcription termination site is located after the ORF, beyond the translation stop codon. In eukaryotic genes with multiple exons, ORFs span intron/exon regions, which may be spliced together after transcription of the ORF to yield the final mRNA for protein translation.

[0108] An exon is any part of a gene that will encode a part of the final mature RNA produced by that gene after introns have been removed by RNA splicing. The term exon refers to both the DNA sequence within a gene and to the corresponding sequence in RNA transcripts. In RNA splicing, introns are removed and exons are covalently joined to one another as part of generating the mature messenger RNA.

[0109] Thus, the untranslated sequences in 3′end and in 5′ (3′UTR and 5′UTR) present in mature RNA after splicing are exonic sequences, but are non-coding sequences because these sequences are located upstream of the start codon for the translation (5′UTR) or downstream the stop codon ending the translation (3′UTR).

[0110] “TPM” as used herein means “transcripts per million”. FPKM (fragments per kilobase of exon model per million reads mapped) and TPM (transcripts per million) are the most common units reported to estimate gene expression based on RNA-seq data. Both units are calculated from the number of reads that mapped to each particular gene sequence and both units are calculated taking into account two important factors in RNA-seq:
[0111] The number of reads from a gene depends on its length. One expects more reads to be produced from longer genes.
[0112] The number of reads from a gene depends on the sequencing depth that is the total number of reads you sequenced. One expects more reads to be produced from the sample that has been sequenced to a greater depth.

[0113] FPKM (introduced by Trapnell, C., Williams, B., Pertea, G. et al. Nat Biotechnol 28, 511-515 (2010).) are calculated with the following formula:

$$F P K {M}_{i} = \frac{{q}_{l}}{\frac{{l}_{i}}{{10}^{3}} * \frac{{\sum }_{j} {q}_{j}}{{10}^{6}}} = \frac{q}{{l}_{i} * {\sum }_{j} {q}_{j}} * 1 {0}^{9}$$

[0114] where qi are raw counts (number of reads that mapped for each gene), li is gene length and total number mapped reads is the total number of mapped reads. The interpretation of FPKM is that if you sequence your RNA sample again, you expect to see for gene i, FPKMi reads divided by gene i length over a thousand and divided by the total number of reads mapped over a million.

[0115] Li and Dewey, 2011 (Li, B., Dewey, C. N. RSEM: accurate transcript quantification from RNA-Seq data with or without a reference genome. BMC Bioinformatics 12, 323 (2011)) introduced the unit TPM and Pachter, 2011 (arXiv:1104.3889 [q-bio.GN] “Models for transcript quantification from RNA-Seq”) established the relationship between both units. It is possible to compute TPM from FPKM as follows:

$$T P {M}_{i} = ( \frac{F P F {M}_{i}}{{\sum }_{j} {FPKM}_{j}} ) * {10}^{6}$$

[0116] For TPM definition, the following definition can also be consulted: Wagner et al., Theory Biosci. 2012 December; 131(4):281-5.

[0117] For example, in the EMBL expression atlas database (which contains thousands of selected microarray and RNA-sequencing data that are manually curated and annotated with ontology terms Baseline expression results), baseline expression levels are set as follow and represented in different colours (see https://www.ebi.ac.uk/gxa/FAQ.html):
[0118] Grey box: expression level is below cutoff (0.5 FPKM or 0.5 TPM)
[0119] Light blue box: expression level is low (between 0.5 to 10 FPKM or 0.5 to 10 TPM)
[0120] Medium blue box: expression level is medium (between 11 to 1000 FPKM or 11 to 1000 TPM)
[0121] Dark blue box: expression level is high (more than 1000 FPKM or more than 1000 TPM)

[0122] If not otherwise specified, the above-mentioned reference expression levels can be used as reference, or thresholds, in the methods and definitions of the present disclosure. In some embodiments however, other threshold values can be used. For example, depending on the mean expression of the transcript in a sample from the disease of interest, the expression threshold or cut-off can be set at 7.5 TPM or 10 TPM.

[0123] The term “peptide or polypeptide,” is used interchangeably with “neoantigenic peptide or polypeptide” in the present specification to designate a series of residues, typically L-amino acids, connected one to the other, typically by peptide bonds between the α-amino and carboxyl groups of adjacent amino acids. The polypeptides or peptides can be a variety of lengths, either in their neutral (uncharged) forms or in forms which are salts, and either free of modifications such as glycosylation, side chain oxidation, or phosphorylation or containing these modifications, subject to the condition that the modification not destroy the biological activity of the polypeptides as herein described.

[0124] A “tumor neoantigenic peptide”, as per the present application is a peptide that induces T cell reactivity.

[0125] In some embodiments, tumor neoantigenic peptides are entirely absent from the normal genome (in particular from the human genome). Such peptides are recognized as different from self and are presented by antigen-presenting cells (APC), such as dendritic cells (DC) and tumor cells themselves. Cross-presentation plays an important role as the APC is able to translocate exogenous antigens from the phagosome into the cytosol for proteolytic cleavage into the major histocompatibility complex I (MHC I) epitopes by the proteasome. Targeting such highly specific neoantigens (or neoantigenic peptides) enables immune cell to distinguish cancerous cells from normal cell avoiding the risk for autoimmunity. Typically, neoantigenic peptides-specific T cells possess functional avidity that may reach the avidity strength of anti-viral T cells (see Lennerz V et al., Cancer immunotherapy based on mutation-specific CD4+ T cells in human melanoma. Nat Med 2015; 21:81-5).

[0126] In some embodiments, tumor neoantigenic peptides as per the present application can also include peptides or proteins to which T cell tolerance is incomplete, typically because of restricted and/or low tissue expression pattern. Such neoantigenic peptides are typically highly and/or disproportionately expressed in tumor cells (i.e.: in tumor samples) as compared to normal (healthy) cells (i.e.: in normal samples). Tumor neoantigenic peptides may also be selectively expressed by the cell lineage from which the tumor evolved.

[0127] Ewing's sarcoma is a type of cancer that forms in bone or soft tissue. Ewing's sarcoma is the second most common malignant bone tumour occurring in children and young adults, and accounts for 10-15% of all primary bone tumours. Ewing's sarcoma can affect any bone but the most common sites are the lower extremity (45%), followed by the pelvis (20%), upper extremity (13%), axial skeleton and ribs (13%), and face (2%). 6 The femur is the most frequently affected bone, with the tumour usually arising in the midshaft. Typically, by light microscopy, the tumour consists of small round cells with regular round nuclei containing finely dispersed chromatin and inconspicuous nucleoli, and a narrow rim of clear or pale cytoplasm. Tumours with similar histology also arise in soft tissues. These include peripheral primitive neuroectodermal tumour (pPNET), neuroepithelioma, and Askin tumour. pPNET is the second most common soft tissue malignancy in childhood, accounting for 20% of sarcomas. 7 It is frequently found in the chest wall (Askin tumour), paraspinal tissues, abdominal wall, head and neck, and extremities. However, soft tissue extension is common in osseous Ewing's sarcoma and infiltration of adjacent bone is frequent in soft tissue pPNETs, which often makes it difficult to determine the primary site of tumour origin (Burchill S A. Ewing's sarcoma: diagnostic, prognostic, and therapeutic implications of molecular abnormalities. J Clin Pathol. 2003; 56(2):96-102) (Burchill S A. Ewing's sarcoma: diagnostic, prognostic, and therapeutic implications of molecular abnormalities. J Clin Pathol. 2003; 56(2): 96-102).

[0128] Typically, a subject of the present application is a mammal and notably a human. Thus, typically, the representative, or reference genome or transcriptome is the human genome or transcriptome.

[0129] Unless specifically stated or obvious from context, as used herein, the term “about” is to be understood as within a range of normal tolerance in the art, for example within 2 standard deviations of the mean. About can be understood as within 20%, 15%, 10%, 9%, 8%, 7%, 6%, 5%, 4%, 3%, 2%, 1%, 0.5%, 0.1%, 0.05%, or 0.01% of the stated value. Unless otherwise clear from context, all numerical values provided herein are modified by the term about.

[0130] Method for Selecting a Tumor Neoantigenic Peptide

[0131] The present disclosure provides a method for identifying tumor specific neoantigenic peptides which comprises:
[0132] i. identifying transcripts from one or more samples isolated from a tumor driven by a transcription factor fusion and obtained from one or more subjects,
   [0133] which transcription is specifically positively regulated by said transcription factor fusion,
   [0134] which are specifically associated with the transcription-fusion tumor type, and optionally
   [0135] which are encoded by neogenes, notably that originate from intergenic or intronic regions of the genome;
[0136] ii. identifying open reading frame (ORF) sequences from the transcripts of step (i), optionally wherein said ORF sequences are specifically expressed in a tissue (or cell) sample from said transcription factor fusion-driven tumor.

[0137] Neotranscripts as herein described typically align to the representative genome of the subject (e.g., typically the human genome), but do not align to the representative (e.g., typically the human) transcriptome (i.e. they have no match in the normal representative transcriptome). These transcripts are encoded from genome regions (intronic or intergenic) that are transcriptionally silent when the transcription factor fusion is not expressed. They can also be named unannotated transcripts (also named in the present application neo-transcripts) as they are typically unannotated in the databases referencing genes and their transcripts from normal cells or tissues. Therefore, the potential ORFs of the transcripts identified at step i) do not match any known protein in databases.

[0138] As previously defined, the normal representative transcriptome is the corresponding healthy cell or tissue transcriptome. Annotated sequences are sequences, which are typically described in databases such as Ensembl genome database or the expression atlas from EBI (typically the human assembly GRCh37, also known as hg19), the RefSeq human reference genome database, or the GEO databases from NCBI. The GENCODE transcriptome database (https://www.gencodegenes.org/) (typically the human GENCODE human transcriptome database, or the GTEX database (https://gtexportal.org/home/) are also usable according to the present method.

[0139] According to the present disclosure, the neotranscripts identified at step i) are specifically associated with the transcription-fusion tumor type. In other words, the expression of said transcripts is found only (or almost only) tumor cell wherein the corresponding transcription factor fusion is found. Expression of these transcripts can be quantified according to known methods in the field (see the results Section) and expression level compared to a threshold value. Threshold values can be set by default (see the values proposed in the EBIS databases), however in some embodiments of the present disclosure the threshold values can be set at 7.5 TPM at least or at 10 TPM at least. In some embodiments, sporadic low-level expression of said transcripts (as compared to their expression in the transcription factor fusion-driven tumor) can be found in a limited number of tissues or tumors (notably in germinal tissues such as placenta and testis), but these level are much lower, notably at least 10, at least 20, at least 50 or at least 100 times lower than the mean expression level observed in the transcription factor fusion-driven tumor.

[0140] By specifically expressed in a sample from said transcription factor fusion-driven tumor it is herein intended that the identified ORF sequence is expressed at higher level or frequency (typically disproportionally expressed) in the transcription factor fusion-driven tumor sample as compared to any other control samples (typically a corresponding healthy sample or another tumor sample) from the same type of subject. By disproportionally expressed it is intended that the expression is at least 10, at least 20, at least 50 or at least 100 times higher in the transcription factor fusion-driven tumor sample as compared to a control sample (i.e., a corresponding normal cell or tissue). Typically, the transcripts are expressed at a level of 7.5 TPM or more, notably at 10 TPM or more in the sample.

[0141] A transcription factor fusion as per the present disclosure is typically produced by gene fusions which are specific for a given tumor or group of tumors and has gain-of-function activities.

[0142] Gene fusions are hybrid genes formed when two previously independent genes become juxtaposed. The fusion can result from structural rearrangements like translocations, insertions, and deletions, transcription read-through of neighboring genes (see Nacu S et al., “Deep RNA sequencing analysis of readthrough gene fusions in human prostate adenocarcinoma and reference samples” BMC Med Genomics. 2011 Jan. 24; 4:11), or the trans- and cis-splicing of pre-mRNAs (Li H, Wang J, Ma X, Sklar J “Gene fusions and RNA trans-splicing in normal and neoplastic human cells” Cell Cycle. 2009 Jan. 15; 8(2):218-22). Gene fusions commonly exert their oncogenic influence by either deregulating one of the involved genes (e.g. by fusing a strong promoter to a proto-oncogene), forming a fusion protein with oncogenic functionality or inducing a loss of function. Gene fusion landscapes have now been studied in many cancer, or tumor, types, including breast, lung, prostate, lymphoid, soft tissue and gastric cancer (see Latysheva, N. S., & Babu, M. M. 2016 “Discovering and understanding oncogenic gene fusions through data intensive computational approaches” Nucleic acids research, 44(10), 4487-4503, for review).

[0143] Thus, according to the present application, additional fusion genes coding for aberrant fusion transcription factors (see notably Burchill S A. Ewing's sarcoma: diagnostic, prognostic, and therapeutic implications of molecular abnormalities. J Clin Pathol. 2003; 56(2):96-102; Mertens F, Antonescu C R, Mitelman F. Gene fusions in soft tissue tumors: Recurrent and overlapping pathogenetic themes, Genes Chromosomes Cancer. 2016; 55(4):291-310; and Enzinger and Weiss's Soft Tissue Tumors 6th Edition, John Goldblum Sharon Weiss Andrew L. Folpe) may be targeted as per the method as herein disclosed. For example, the fusion gene coding for fusion transcription factors and/or corresponding specific tumors, which are listed below in table 1, may be targeted:

TABLE 1
transcription factor fusion-driven tumors and
corresponding transcription factor fusions.

| SOFT TISSUE TUMOR | GENE FUSION |
|---|---|
| Alveolar rhabdomyosarcoma | PAX3-FOXO1 |
| | PAX7-FOXO1 |
| Alveolar soft part sarcoma | ASPSCR1-TFE3 |
| Angiofibroma | AHRR-NCOA2 |
| Angiomatoid fibrous histiocytoma | EWSR1-CREB1 |
| | EWSR1-ATF1 |
| | FUS-ATF1 |
| Clear cell sarcoma | EWSR1-ATF1 |
| | EWSR1-CREB1 |
| Dermatofibrosarcoma protuberans/ | COL1A1-PDGFB |
| giant cell fibroblastoma | |
| Desmoplastic small round cell | EWSR1-WT1 |
| tumor | |
| Epithelioid | WWTR1-CAMTA1 |
| hemangioendothelioma | TFE3-YAP1 |
| Ewing sarcoma | EWSR1-FLI1 |
| | EWSR1-ERG |
| | EWSR1 fusion with various |
| | ETS partners: ETV1 (7p22), |
| | FEV (2q36), ETV4 (17q21) |
| | FUS-ERG |
| Ewing sarcoma-like | EWSR1-NFATC2 |
| | CIC-DUX4 |
| | CIC-DUX4 |
| | BCOR-CCNB3 |
| EWSR1-PATZ1 sarcoma | EWSR1-PATZ1 |
| Extraskeletal myxoid | EWSR1-NR4A3 |
| chondrosarcoma | TAF15-NR4A3 |
| | TCF12-NR4A3 |
| | TFG-NR4A3 |
| Congenital Infantile | ETV6-NTRK3 or other |
| fibrosarcoma | NTRK fusions |
| Inflammatory myofibroblastic | ALK fusion with: |
| tumor | TPM4 (19p13.1), TPM3 (1q21), |
| | CLTC (17q23), RANBP2 (2q13), |
| | ATIC (2q35), SEC31A (4q21), |
| | CARS (11p15) |
| Lipoblastoma | PLAG1 fusions |
| Lipoma, ordinary | HMGA2 fusions |
| | HMGA1 fusions |
| Lipoma, chondroid | C11orf95-MKL2 |
| Low-grade fibromyxoid | FUS-CREB3L2 |
| sarcoma | FUS-CREB3L1 |
| Mesenchymal chondrosarcoma | HEY1-NCOA2 |
| Midline carcinoma | BRD4-NUTM1 |
| Myoepithelioma, soft tissue | EWSR1-ZNF444 |
| | EWSR1-PBX1 |
| | EWSR1-POU5F1 |
| Myxoid/round cell liposarcoma | FUS-DDIT3 |
| | EWSR1-DDIT3 |
| Myxoid liposarcoma | EWS-CHOP |
| Extraskeletal myxoid | EWS-CHN |
| chondrosarcoma | |
| Myxoinflammatory fibroblastic | TGFBR3-MGEA5 |
| sarcoma/hemosiderotic | |
| fibrolipomatous tumor | |
| Nodular fasciitis | MYH9-USP6 |
| Ossifying fibromyxoid tumor | PHF1 fusions |
| Pericytoma | ACTB-GLI1 |
| TFE3 Renal cell carcinoma | TFE3or TFEB fusions |
| Sclerosing epithelioid | FUS-CREB3L2 |
| fibrosarcoma | FUS-CREB3L1 |
| Solitary fibrous tumor | NAB2-STAT6 |
| Spindle cell | NCOA2 fusion with: |
| rhabdomyosarcoma | SRF(6p21), TEAD1(11p15) |
| Synovial sarcoma | SS18-SSX1 |
| | SS18-SSX2 |
| | SS18-SSX4 |
| Tenosynovial giant cell tumor | CSF1-COL6A3 |

[0144] In some embodiments of the method for identifying tumor neoantigenic peptides as defined above the transcription factor fusion-driven cancer (or tumor) and corresponding transcription factor fusion is selected from table 1. In some embodiments, the transcription factors fusion is a PAX-FOXO fusion, an EWS-FLI1 fusion or an EWS-WT1 fusion and the tumor is alveolar rhabdomyosarcoma, Desmoplastic small round cell tumor or Ewing sarcoma, respectively.

[0145] In more embodiments, the present disclosure provides a method for identifying Ewing-sarcoma specific neoantigenic peptides which comprises:
[0146] i. identifying transcripts from one or more samples isolated from an Ewing Sarcoma tumor obtained from one or more subjects, which transcription is positively regulated by the EWS-FLI1 fusion protein, which transcription is specifically associated with the Ewing sarcoma tumor and optionally which originate (i.e. is encoded) from intergenic or intronic regions of the genome;
[0147] ii. identifying open reading frame (ORF) sequences, among the transcripts of step (i) which are specifically expressed in an Ewing sarcoma sample.

[0148] Identification of transcripts, which are regulated by a transcription factor fusion and which originate (i.e., which are transcripted) from intergenic or intronic regions of the genome, according to step i) of the above defined method can be for example achieved by performing RNA (notably long read (5-15 kb)) sequencing using expression system (notably cell lines) wherein the expression of said transcription factor fusion is made inducible.

[0149] Identification of transcripts which originates from intergenic regions in the genome can be achieved practically by discarding transcripts which have a match in a reference database (see above for definition and suitable examples) of transcriptome from the representative healthy (i.e. normal) tissue or cell and retrieving only transcripts that have no match in said reference database (i.e., unannotated transcript).

[0150] The results included in the present application illustrate identification of unannotated transcripts that are regulated by EWS-FLI1 fusion protein by performing long reads (of about 10 kbases) sequencing (typically using the Pacific Biosciences plateform) using a cell line wherein expression of EWS-FLI1 has been down-regulated (using notably a DOX-inducible small hairpin RNA) and comparison with the human RefSeq database. Only unannotated transcripts that are negatively regulated upon EWS-FLI1 depletion were selected.

[0151] The results also illustrate a short-read strategy to explore in more depth the neotranscriptome of Ewing sarcoma based on genome-guided assembly (Shao and Kingsford, Nat Biotechnol. 2017 December; 35(12):1167-1169). Thus, typically, “Scallop” (Shao M, Kingsford; Nat Biotechnol. 2017), a reference-based transcript assembler, can be used to predict all transcript sequences based on aligned RNA-seq reads, independently of a reference transcriptome annotation (see also the results section relative to the experimental procedure. Transcripts that were not annotated in the reference humanGENCODE database (https://www.gencodegenes.org/human/release_19.html was used for example) were retrieved. The expression of transcripts detected specifically in various Ewing sarcoma samples (and not in other tumors or sarcomas) was explored across various databases of normal and tumor tissues. As mentioned above, some of the identified neogenes were moderately expressed (most less than 10 TPM) in germinal tissues (testis and placenta), and therefore allowed the few genes (less than 1.5% of neogenes identified) expressed in these tissues at more than 10 TPM to pass the filter nonetheless.

[0152] Typically, the transcripts of the present disclosure are further characterized in that they are encoded by neogenes having evidence of physical binding of the transcription factor fusion near their transcription star site (typically less than 5 kb), such as repeated (at least 2, 3, 4 or more) known binding motifs of transcription factors involved in promoter regulation, such as GGAA binding sites (Grunewald et al., Nat Rev Dis Primers. 2018 Jul. 5; 4(1):5) and/or chromatin activation marks. Typically, the binding motifs can be identified ChIP-Sequencing assays. By combining chromatin immunoprecipitation (ChIP) assays with sequencing, ChIP sequencing (ChIP-Seq) can thus be used for identifying genome-wide DNA binding sites for transcription factors. Following ChIP protocols, DNA-bound protein is immunoprecipitated using a specific antibody. The bound DNA is then coprecipitated, purified, and sequenced.

[0153] Typically, the EWS-FLI1 transcription factor fusion regulates of the transcription of the unannotated transcript upon binding on GGAA microsatellite sequences in the promoter region of said unannotated transcripts preferably also in the presence of activated histone marks, notably H3K27ac and/or H3K4me3 histone marks. Identifications of such binding domains and/or chromatin activation marks can be achieved for example using RNA seq data from Illumina Plateform and/or ChIP-seq data using appropriate filters, such as the presence of repeated (at least 2; 3; 4 times or more) GGAA motifs (poly GGAA motifs) and/or the presence of histone marks in the promoter or enhancer region of the transcript.

[0154] Cancer cells according to the present disclosure can be isolated from solid tumors or non-solid tumors as previously defined, notably bone tumors or soft tissue tumors. Typically, cancer cells are from an Ewing sarcoma tumor sample.

[0155] According to the present disclosure, the mRNA sequences can come from all types of cancer cell or tumor cell sample(s). The tumor may be a solid or a non-solid tumor, notably bone tumors or soft tissue tumors. In particular, the mRNA sequences come from an Ewing sarcoma sample from a primary or secondary tumor.

[0156] According to the present disclosure, the neo-transcript sequences are expressed at higher levels in tumor cells compared to normal healthy cells (e.g., disproportionally expressed in tumor cells as compared to normal healthy cells). Typically, the ratio of the median expression in the tumor sample over the median level of expression in all normal tissues is more than 5, notably more than 10 or more than 20. In some embodiments, the neo-transcript sequence is expressed in tumor cells and not in healthy cells, in particular not in thymus healthy cells. Such neo-transcript may be called tumor specific neo-transcripts as per the present disclosure. Neo-transcripts that are expressed at higher level(s) in tumor cells as compared to normal cell, typically that are disproportionally expressed in tumors cells as compared to normal cells as defined above may be called tumor associated neo-transcripts as per the present disclosure.

[0157] Typically said neo-transcripts are expressed in more than one representative Ewing sarcoma, notably more than 4 representative Ewing sarcoma.

[0158] In some embodiment, a neo-transcript as per the present disclosure is expressed in at least 1%, notably at least 5%, 6%, 7%, 8%, 9%, 10%, 15%, 20%, 25%, 30%, 40%, 50%, 60%, 70%, 80%, 90%, 95%, or even 99% of a population of subjects suffering from a tumor and more specifically from a population of subjects suffering from Ewing sarcoma. In some embodiments, a neotranscript according to the present disclosure is expressed in 100% of subjects suffering from a cancer, or tumor, and more specifically from a population of subjects suffering from Ewing sarcoma.

[0159] The neo-transcript sequence may be specific for a cancer, or tumor, cell type of shared between cancer, or tumor, cells. Typically, the neo-transcript is specific for Ewing sarcoma samples.

[0160] Open reading frame of the neo-transcripts can be then predicted, for example using ORF finder tools which are well-known in the field, notably by using ORFfinder (https://www.ncbi.nlm.nih.gov/orffinder/), in the three frames, with parameters “minimal ORF length”=75 nucleotides and “ORF start codon”=any.

[0161] The method as herein disclosed typically further comprises a step of determining the binding of putative neoantigen peptides to at least one MEW molecule of a subject or population of subjects suffering from the cancer, or tumor, driven by said transcription factor fusion (notably Ewing sarcoma). Typically, such step can be performed in silico.

[0162] MEW class I proteins form a functional receptor on most nucleated cells of the body. There are 3 major MEW class I genes in HLA: HLA-A, HLA-B, HLA-C and three minor genes HLA-E, HLA-F and HLA-G. 32-microglobulin binds with major and minor gene subunits to produce a heterodimer. MEW molecules of class I consist of a heavy chain and a light chain and are capable of binding a peptide of about 8 to 11 amino acids, but usually 8 or 9 amino acids, if this peptide has suitable binding motifs, and presenting it to cytotoxic T-lymphocytes. The binding of the peptide is stabilized at its two ends by contacts between atoms in the main chain of the peptide and invariant sites in the peptide-binding groove of all MEW class I molecules. There are invariant sites at both ends of the groove which bind the amino and carboxy termini of the peptide. Variations in peptide length are accommodated by a kinking in the peptide backbone, often at proline or glycine residues that allow the required flexibility. The peptide bound by the MEW molecules of class I usually originates from an endogenous protein antigen. As an example, the heavy chain of the MHC molecules of class I is typically an HLA-A, HLA-B or HLA-C monomer, and the light chain is β-2-microglobulin, in humans.

[0163] There are 3 major and 2 minor MHC class II proteins encoded by the HLA. The genes of the class II combine to form heterodimeric (αβ) protein receptors that are typically expressed on the surface of antigen-presenting cells. The peptide bound by the MHC molecules of class II usually originates from an extracellular or exogenous protein antigen. As an example, the α-chain and the β-chain are in particular HLA-DR, HLA-DQ and HLA-DP monomers, in humans. MHC class II molecules are capable of binding a peptide of about 8 to 20 amino acids, notably from 10 to 25 or from 13 to 25 if this peptide has suitable binding motifs, and presenting it to T-helper cells. These peptides lie in an extended conformation along the MHC II peptide-binding groove which (unlike the MHC class I peptide-binding groove) is open at both ends. The peptide is held in place mainly by main-chain atom contacts with conserved residues that line the peptide-binding groove.

[0164] In the present application, “MHC molecule” refers to at least one MHC class I molecule or at least one MHC Class II molecule.

[0165] When carried out on human samples, the method may comprise a step of determining the patient's class I or class I Major Histocompatibility Complex (MHC, aka human leukocyte antigen (HLA) alleles).

[0166] A MHC allele database is carried out by analyzing known sequences of MHC I and MHC II and determining allelic variability for each domain. This can be typically determined in silico using appropriate software algorithms well-known in the field. Several tools have been developed to obtain HLA allele information from genome-wide sequencing data (whole-exome, whole-genome, and RNA sequencing data), including OptiType, Polysolver, PHLAT, HLAreporter, HLAforest, HLAminer, and seq2HLA (see Kiyotani K et al., Immunopharmacogenomics towards personalized cancer immunotherapy targeting neoantigens; Cancer Science 2018; 109:542-549). For example, the seq2hla tool (see Boegel S, Lower M, Schafer M, et al. HLA typing from RNA-Seq sequence reads. Genome Med. 2012; 4:102), which is well designed to perform the method as herein disclosed is an in silico method written in python and R, which takes standard RNA-Seq sequence reads in fastq format as input, uses a bowtie index (Langmead B, et al., Ultrafast and memory-efficient alignment of short DNA sequences to the human genome. Genome Biol. 2009, 10: R25-10.1186/gb-2009-10-3-r25) comprising all HLA alleles and outputs the most likely HLA class I and class II genotypes (in 4 digit resolution), a p-value for each call, and the expression of each class.

[0167] The affinity of all possible peptides encoded by each neo-transcript sequence for each MEW allele from the subject can be determined in silico using computational methods to predict peptide binding-affinity to HLA molecules. Indeed, accurate prediction approaches are based on artificial neural networks with predicted IC₅₀. For example, NetMHCpan software which has been modified from NetMHC to predict peptides binding to alleles for which no ligands have been reported, is well appropriate to implement the method as herein disclosed (Lundegaard C et al., NetMHC-3.0: accurate web accessible predictions of human, mouse and monkey MEW class I affinities for peptides of length 8-11; Nucleic Acids Res. 2008; 36:W509-W512; Nielsen M et al. NetMHCpan, a method for quantitative predictions of peptide binding to any HLA-A and -B locus protein of known sequence. PLoS One. 2007; 2:e796, but see also Kiyotani K et al., Immunopharmacogenomics towards personalized cancer immunotherapy targeting neoantigens; Cancer Science 2018; 109:542-549 and Yarchoan M et al., Nat rev. cancer 2017; 17(4):209-222). NetMHCpan software predicts binding of peptides to any MHC molecule of known sequence using artificial neural networks (ANNs). The method is trained on a combination of more than 180,000 quantitative binding data and MS derived MEW eluted ligands. The binding affinity data covers 172 MEW molecules from human (HLA-A, B, C, E), mouse (H-2), cattle (BoLA), primates (Patr, Mamu, Gogo) and swine (SLA). The MS eluted ligand data covers 55 HLA and mouse alleles.

[0168] In example embodiments, neoantigenic peptides encoded by neo-transcripts as herein disclosed and having a Kd affinity of predicted peptides for MHC alleles with a score less than 10⁻⁴. 10⁻⁵, 10⁻⁶, 10⁻⁷, or less than 500 nM or a rank less than 2% (typically depending on netMHCpan version) are selected as tumor neoantigenic peptides.

[0169] In a particular embodiment, neoantigenic peptides, and a Kd affinity of predicted peptides for MHC alleles with a score less than 50 nM or a rank less than 0.5% (typically depending on netMHCpan version) are selected as tumor neoantigenic peptides.

[0170] Thus, the neoantigenic peptide as per the present disclosure, and typically obtainable as per the present method, binds at least one HLA/MHC molecule with an affinity sufficient for the peptide to be presented on the surface of a cell as an antigen. Generally, the neoantigenic peptide has an IC50 affinity of less than 10⁻⁴. or 10⁻⁵, or 10⁻⁶, or 10⁻⁷ or less than 500 nM, at least less than 250 nM, at least less than 200 nM, at least less than 150 nM, at least less than 100 nM, at least less than 50 nM or less for at least one HLA/MHC molecule (lower numbers indicating greater binding affinity), typically a molecule of said subject suffering from a cancer, or a tumor.

[0171] Peptides binding to MHC Class 1 molecules can thus be predicted using for example the NetMHCpan 4.1 suite (http://www.cbs.dtu.dk/services/NetMHCpan/), using “HLA allele”=A2, “peptide length”=8-11 and “rank threshold for strong binding”=0.5%.

[0172] In some embodiments, the present method may thus independently include:
[0173] a step of exclusion of fusion transcripts or predicted peptides expressed at high levels or high frequency on healthy cells. An alignment of the neo-transcript sequence against the Refseq data (Reference Sequence collection from NCBI providing integrated set of annotated sequences, including genomic DNA, transcripts, and proteins) of healthy cells, allow determining the relative amount of fusion transcript sequence(s) present in healthy cells; In one embodiment, fusion transcripts or predicted peptides expressed on healthy cells are discarded.
[0174] a step to confirm that a selected tumor neoantigenic peptide is not expressed in healthy cells of the subject. This step can be carried out in silico using typically the Basic local alignment search tool (BLAST) and performing alignment of the sequence of the neoantigenic peptide against the proteome of healthy cells; and/or
[0175] a step to confirm that the fusion transcript or predicted peptide is expressed in cancer, or tumor, cells of the subject. The presence of the selected fusion transcript sequence in cancer, or tumor, cells can be checked typically by RT-PCR in mRNA extracted from said cells (see for example WO93/23549).

[0176] Neoantigenic Peptides, Polynucleotides and Vectors

[0177] The present disclosure also encompasses neotranscripts having at least the following characteristics:
[0178] i) their expression is regulated by a transcription factor fusion as evidenced by expression in cell line wherein the expression of said transcription factor fusion is made inducible,
[0179] ii) they are specifically associated with the fusion-driven tumor type,
[0180] iii) they are encoded by genome regions having binding motifs involved in promoter regulation, such as poly GGAA, binding sites and/or binding sites for said transcription factor as determined by ChIP-seq experiments, and/or histone activation marks, such as H3K27ac and H3K4me3 histone at less than 5 kb of the TSS.

[0181] In some embodiments, the transcripts are further selected according to one or more of the following properties:
[0182] their mean expression in the disease of interest (i.e., the transcription factor fusion-driven tumor) of more than 7.5 TPM,
[0183] Logarithm of (mean expression in other samples/mean expression in disease of interest) of less than 3,
[0184] mean expression in any other samples (i.e., any sample that is not a sample from the disease of interest) of less than 2 TPM, notably between 0 and 2 TPM.
[0185] 99% quantile of expression in other samples comprised between 0 and 10 TPM,
[0186] maximum mean expression in another tumor or tissue of less than 10 TPM, notably of less than, typically comprised between 0 and 10 TMP (excluding testis and placenta),

[0187] The present disclosure also relates to an isolated tumor neoantigenic peptide comprising at least 8, 9, 10, 11, or 12 amino acids, encoded by a portion of an open reading frame (ORF) from a neo-transcript sequence as herein disclosed, and/or obtained according to a method of the present disclosure. The peptide may be 8-9, 8-10, 8-11, 12-25, 13-25, 12-20, or 13-20 amino acids in length.

[0188] The present disclosure also more specifically encompasses an Ewing sarcoma isolated tumor neoantigenic peptide encoded by a portion of a human mRNA neo-transcript sequence from an Ewing sarcoma cell, which transcription is positively regulated by the EWS-FLI1 fusion protein.

[0189] In example embodiments the neoantigenic peptide comprising at least 8, 9, 10, 11 or 12 amino acids is encoded by a part of an open reading frame (ORF) of any of the neo-transcript sequences as defined in SEQ ID NO:1-145.

[0190] The N-terminus of the peptides of at least 8 amino acids may be encoded by the triplet codon starting at any of nucleotide positions 1, 4, 7, 10, 13, 16, 19.

[0191] A peptide as above defined is typically obtainable according to the method of the present disclosure and thus encompasses one or more of the characteristics as previously described. In particular a neoantigenic peptide as per the present disclosure may exhibit one or more of a combination of the following characteristics:
[0192] It binds or specifically binds MEW class I of a subject and is 8 to 11 amino acids, notably 8, 9, 10, or 11 amino acids. Typically, the neoantigenic peptide is 8 or 9 amino acids long, and binds to at least one MEW class I molecule of the subject; or alternatively, it binds to at least one MEW class II molecule of said subject and contains from 12 to 25 amino acids, notably is 12, 13, 14, 15, 16, 17, 18, 19, 20, 21, 22, 23, 24 or 25 amino acids long.
[0193] It binds at least one HLA/MHC molecule of said subject suffering from a cancer, or a tumor (notably a transcription factor fusion-riven cancer or tumor as herein described) with an affinity sufficient for the peptide to be presented on the surface of a cell as an antigen. Typically, the neoantigenic peptide has an IC50 of less than 10⁻⁴. or 10⁻⁵, or 10⁻⁶, or 10⁻⁷ or less than 500 nM, at least less than 250 nM, at least less than 200 nM, at least less than 150 nM, at least less than 100 nM, at least less than 50 nM or less (lower numbers indicating greater binding affinity).
[0194] It does not induce an autoimmune response and/or invoke immunological tolerance when administered to a subject.
[0195] It is expressed at higher levels in tumor cells compared to normal healthy cells. Typically, the ratio of its median expression in the tumor sample over the median level of expression in all normal tissues is more than 5, notably more than 10 or more than 20. In another embodiment, the neoantigenic peptide is a tumor specific antigen (TSA), i.e.: it is only expressed in cancer, or tumor cells and not in healthy cells (e.g., not detectably expressed). Lack of expression of a neoantigenic peptide in healthy cell mays be tested using notably the Basic local alignment search tool (BLAST) and performing alignment of the sequence of the neoantigenic peptide against the proteome of healthy cells.

[0196] A tumor neoantigenic peptide may first be validated by RT transcription analysis of fusion transcripts sequence in tumors cell from a subject. Typically also, immunization with a tumor neoantigenic peptide as per the present disclosure elicits a T cell response

[0197] In a particular embodiment, the present disclosure encompasses an Ewing sarcoma specific neoantigenic peptide comprising at least 8 amino acids. Typically, said neoantigenic peptides binds to HLA-A02 with an affinity sufficient for the peptide to be presented on the surface of cells as an antigen. Kd affinity can be determined or predicted by using tetramer preparation as illustrated in the examples. Briefly, HLA 02:01/peptide tetramers can be prepared using adapted commercial kits and incubated with human CD8+ prepared from healthy controls. Tetramer-CD8+ cell binding can be assessed by flow cytometry.

[0198] In a particular embodiment, a tumor neoantigenic peptide as per the present disclosure binds to a MHC molecule present in at least 1%, 5%, 10%, 15%, 20%, 25% or more of subjects. Notably, a tumor neoantigenic peptide as herein disclosed is expressed in at least 1%, 5%, 10%, 15%, 20%, 25% of subjects from a population of subjects suffering from a cancer or a tumor, notably suffering from Ewing sarcoma.

[0199] More particularly, a tumor neoantigenic peptide of the present disclosure is capable of eliciting an immune response against a tumor present in at least 5%, 6%, 7%, 8%, 9%, 10%, 15%, 20%, 25%, 30%, 40%, 50%, 60%, 70%, 80%, 90%, 95%, or even 99% of a population of subjects suffering from a cancer, or a tumor, and more specifically from a population of subjects suffering from Ewing sarcoma. In some embodiments, a tumor neoantigenic peptide according to the present disclosure is expressed in 100% of subjects suffering from a cancer, or a tumor, and more specifically from a population of subjects suffering from Ewing sarcoma.

[0200] The neoantigenic peptide can also be modified by extending or decreasing the compound's amino acid sequence, e.g., by the addition or deletion of amino acids. The peptides can also be modified by altering the order or composition of certain residues, it being readily appreciated that certain amino acid residues essential for biological activity, e.g., those at critical contact sites or conserved residues, may generally not be altered without an adverse effect on biological activity. The non-critical amino acids need not be limited to those naturally occurring in proteins, such as L-α-amino acids, or their D-isomers, but may include non-natural amino acids as well, such as β-γ-δ-amino acids, as well as many derivatives of L-α-amino acids.

[0201] Typically, a series of peptides with single amino acid substitutions are employed to determine the effect of electrostatic charge, hydrophobicity, etc. on binding. For instance, a series of positively charged (e.g., Lys or Arg) or negatively charged (e.g., Glu) amino acid substitutions are made along the length of the peptide revealing different patterns of sensitivity towards various MEW molecules and T cell receptors. In addition, multiple substitutions using small, relatively neutral moieties such as Ala, Gly, Pro, or similar residues may be employed. The substitutions may be homo-oligomers or hetero-oligomers. The number and types of residues which are substituted or added depend on the spacing necessary between essential contact points and certain functional attributes which are sought (e.g., hydrophobicity versus hydrophilicity). Increased binding affinity for an MHC molecule or T cell receptor may also be achieved by such substitutions, compared to the affinity of the parent peptide. In any event, such substitutions should employ amino acid residues or other molecular fragments chosen to avoid, for example, steric and charge interference which might disrupt binding.

[0202] Amino acid substitutions are typically of single residues. Substitutions, deletions, insertions or any combination thereof may be combined to arrive at a final peptide. Substitutional variants are those in which at least one residue of a peptide has been removed and a different residue inserted in its place. Such substitutions are generally made in accordance with the following Table 2 when it is desired to finely modulate the characteristics of the peptide.

TABLE 2

| Original residue | Exemplary substitution |
|---|---|
| Ala | Ser |
| Arg | Lys, His |
| Asn | Gln |
| Asp | Glu |
| Cys | Ser |
| Gln | Asn |
| Glu | Asp |
| Gly | Pro |
| His | Lys; Arg |
| Ile | Leu; Val |
| Leu | Ile; Val |
| Lys | Arg; His |
| Met | Leu; Ile |
| Phe | Tyr; Trp |
| Ser | Thr |
| Thr | Ser |
| Trp | Tyr, Phe |
| Tyr | Trp, Phe |
| Val | Ile, Leu |
| Pro | Gly |

[0203] Substantial changes in function (e.g., affinity for MHC molecules or T cell receptors) are made by selecting substitutions that are less conservative than those in above Table, i.e., selecting residues that differ more significantly in their effect on maintaining (a) the structure of the peptide backbone in the area of the substitution, for example as a sheet or helical conformation, (b) the charge or hydrophobicity of the molecule at the target site or (c) the bulk of the side chain. The substitutions which in general are expected to produce the greatest changes in peptide properties will be those in which (a) hydrophilic residue, e.g. seryl, is substituted for (or by) a hydrophobic residue, e.g. leucyl, isoleucyl, phenylalanyl, valyl or alanyl; (b) a residue having an electropositive side chain, e.g., lysl, arginyl, or histidyl, is substituted for (or by) an electronegative residue, e.g. glutamyl or aspartyl; or (c) a residue having a bulky side chain, e.g. phenylalanine, is substituted for (or by) one not having a side chain, e.g., glycine.

[0204] The peptides and polypeptides may also comprise isosteres of two or more residues in the neoantigenic peptide or polypeptides. An isostere as defined here is a sequence of two or more residues that can be substituted for a second sequence because the steric conformation of the first sequence fits a binding site specific for the second sequence. The term specifically includes peptide backbone modifications well known to those skilled in the art. Such modifications include modifications of the amide nitrogen, the α-carbon, amide carbonyl, complete replacement of the amide bond, extensions, deletions or backbone crosslinks. See, generally, Spatola, Chemistry and Biochemistry of Amino Acids, Peptides and Proteins, Vol. VII (Weinstein ed., 1983).

[0205] In addition, the neoantigenic peptide may be conjugated to a carrier protein, a ligand, or an antibody. Half-life of the peptide may be improved by PEGylation, glycosylation, polysialylation, HESylation, recombinant PEG mimetics, Fc fusion, albumin fusion, nanoparticle attachment, nanoparticulate encapsulation, cholesterol fusion, iron fusion, or acylation.

[0206] Modifications of peptides and polypeptides with various amino acid mimetics or unnatural amino acids are particularly useful in increasing the stability of the peptide and polypeptide in vivo. Stability can be assayed in a number of ways. For instance, peptidases and various biological media, such as human plasma and serum, have been used to test stability. See, e.g., Verhoef et al., Eur. J. Drug Metab Pharmacokin. 11:291-302 (1986). Half life of the peptides of the present disclosure is conveniently determined using a 25% human serum (v/v) assay. The protocol is generally as follows. Pooled human serum (Type AB, non-heat inactivated) is delipidated by centrifugation before use. The serum is then diluted to 25% with RPMI tissue culture media and used to test peptide stability. At predetermined time intervals a small amount of reaction solution is removed and added to either 6% aqueous trichloracetic acid or ethanol. The cloudy reaction sample is cooled (4° C.) for 15 minutes and then spun to pellet the precipitated serum proteins. The presence of the peptides is then determined by reversed-phase HPLC using stability-specific chromatography conditions.

[0207] The peptides and polypeptides may be modified to provide desired attributes other than improved serum half-life. For instance, the ability of the peptides to induce CTL activity can be enhanced by linkage to a sequence which contains at least one epitope that is capable of inducing a T helper cell response. Particularly preferred immunogenic peptides/T helper conjugates are linked by a spacer molecule. The spacer is typically comprised of relatively small, neutral molecules, such as amino acids or amino acid mimetics, which are substantially uncharged under physiological conditions. The spacers are typically selected from, e.g., Ala, Gly, or other neutral spacers of nonpolar amino acids or neutral polar amino acids. It will be understood that the optionally present spacer need not be comprised of the same residues and thus may be a hetero- or homo-oligomer. When present, the spacer will usually be at least one or two residues, more usually three to six residues. Alternatively, the peptide may be linked to the T helper peptide without a spacer.

[0208] The neoantigenic peptide may be linked to the T helper peptide either directly or via a spacer either at the amino or carboxy terminus of the peptide. The amino terminus of either the neoantigenic peptide or the T helper peptide may be acylated. Exemplary T helper peptides include tetanus toxoid 830-843, influenza 307-319, malaria circumsporozoite 382-398 and 378-389.

[0209] Proteins or peptides may be made by any technique known to those of skill in the art, including the expression of proteins, polypeptides or peptides through standard molecular biological techniques, the isolation of proteins or peptides from natural sources, or the chemical synthesis of proteins or peptides. The nucleotide and protein, polypeptide and peptide sequences corresponding to various genes have been previously disclosed, and may be found at computerized databases known to those of ordinary skill in the art. One such database is the National Center for Biotechnology Infornation's Genbank and GenPept databases located at the National Institutes of Health website. The coding regions for known genes may be amplified and/or expressed using the techniques disclosed herein or as would be known to those of ordinary skill in the art. Alternatively, various commercial preparations of proteins, polypeptides and peptides are known to those of skill in the art.

[0210] In a further aspect, the present disclosure provides a nucleic acid (e.g. polynucleotide) encoding a neoantigenic peptide as herein disclosed. The polynucleotide may be selected from DNA, cDNA, PNA, CNA, RNA, either single- and/or double-stranded, or native or stabilized forms of polynucleotides, such as for example polynucleotides with a phosphorothiate backbone, or combinations thereof and it may or may not contain introns so long as it codes for the peptide. Only peptides that contain naturally occurring amino acid residues joined by naturally occurring peptide bonds are encodable by a polynucleotide. In some embodiments, the polynucleotide may be linked to a heterologous regulatory control sequence (e.g., heterologous transcriptional and/or translational regulatory control nucleotide sequences as well-known in the field).

[0211] A still further aspect of the disclosure provides an expression vector capable of expressing a neoantigenic peptide as herein disclosed. Expression vectors for different cell types are well known in the art and can be selected without undue experimentation. Generally, the DNA is inserted into an expression vector, such as a plasmid, in proper orientation and correct reading frame for expression. The expression vector will comprise the appropriate heterologous transcriptional and/or translational regulatory control nucleotide sequences recognized by the desired host. The polynucleotide encoding the tumor neoantigenic peptide may be linked to such heterologous regulatory control nucleotide sequences or may be non-adjacent yet operably linked to such heterologous regulatory control nucleotide sequences. The vector is then introduced into the host through standard techniques. Guidance can be found for example in Sambrook et al. (1989) Molecular Cloning, A Laboratory Manual, Cold Spring Harbor Laboratory, Cold Spring Harbor, N.Y.

[0212] Antigen Presenting Cells (APCs)

[0213] The present disclosure also encompasses a population of antigen presenting cells that have been pulsed with one or more of the peptides as previously defined and/or obtainable in a method as previously described. Preferably, the antigen presenting cells are dendritic cell (DCs) or artificial antigen presenting cells (aAPCs) (see Neal, Lillian R et al. “The Basics of Artificial Antigen Presenting Cells in T Cell-Based Cancer Immunotherapies.” Journal of immunology research and therapy vol. 2,1 (2017): 68-79). Dendritic cells (DC) are professional antigen-presenting cells (APC) that have an extraordinary capacity to stimulate naive T-cells and initiate primary immune responses to pathogens. Indeed, the main role of mature DCs are to sense antigens and produce mediators that activate other immune cells, particularly T cells. DCs are potent stimulators for lymphocyte activation as they express MHC molecules that trigger TCRs (signal 1) and co-stimulatory molecules (signal 2) on T cells. Additionally, DCs also secrete cytokines that support T cell expansion. T cells require presented antigen in the form of a processed peptide to recognize foreign pathogens or tumor. Presentation of peptide epitopes derived from pathogen/tumor proteins is achieved through MHC molecules. MHC class I (MHC-I) and MHC class II (MHC-II) molecules present processed peptides to CD8+ T cells and CD4+ T cells, respectively. Importantly, DCs home to inflammatory sites containing abundant T cell populations to foster an immune response. Thus, DCs can be a crucial component of any immunotherapeutic approach, as they are intimately involved with the activation of the adaptive immune response. In the context of vaccines, DC therapy can enhance T cell immune responses to a desired target in healthy volunteers or patients with infectious disease or cancer. In one embodiment, APCS are artificial APC, which are genetically modified to express the desired T-cell co-stimulatory molecules, human HLA alleles and/or cytokines. Such artificial antigen presenting cells (aAPC) are able to provide the requirements for adequate T-cell engagement, co-stimulation, as well as sustained release of cytokines that allow for controlled T-cell expansion. These cells are not subject to the constraints of time and limited availability and can be stored in small aliquots for subsequent use in generating T-cell lines from different donors, thus representing an off the shelf reagent for immunotherapy applications. Expression of potent co-stimulatory signals on these aAPC endows this system with higher efficiency lending to increased efficacy of adoptive immunotherapy. Furthermore, aAPC can be engineered to express genes directing release of specific cytokines to facilitate the preferential expansion of desirable T-cell subsets for adoptive transfer; such as long lived memory T-cells (see for review Hasan A H et al., Artificial Antigen Presenting Cells: An Off the Shelf Approach for Generation of Desirable T-Cell Populations for Broad Application of Adoptive Immunotherapy; Adv Genet Eng. 2015; 4(3): 130, Kim J V, Latouche J B, Rivière I, Sadelain M. The ABCs of artificial antigen presentation. Nat Biotechnol. 2004; 22:403-410 or Wang C, Sun W, Ye Y, Bomba H N, Gu Z. Bioengineering of Artificial Antigen Presenting Cells and Lymphoid Organs. Theranostics 2017; 7(14):3504-3516.).

[0214] Typically, the dendritic cells are autologous dendritic cells that are pulsed with a neoantigenic peptide as herein disclosed. The peptide may be any suitable peptide that gives rise to an appropriate T-cell response. The antigen-presenting cell (or stimulator cell) typically has an MHC class I or II molecule on its surface, and in one embodiment is substantially incapable of itself loading the MHC class I or II molecule with the selected antigen. The MHC class I or II molecule may readily be loaded with the selected antigen in vitro.

[0215] As an alternative the antigen presenting cell may comprise an expression construct encoding a tumor neoantigenic peptide as herein disclosed. The polynucleotide may be any suitable polynucleotide as previously defined and it is preferred that it is capable of transducing the dendritic cell, thus resulting in the presentation of a peptide and induction of immunity.

[0216] Thus the present disclosure encompasses a population of APCs than can be pulsed or loaded with the neoantigenic peptide as herein disclosed, genetically modified (via DNA or RNA transfer) to express at least one neoantigenic peptide as herein disclosed, or that comprise an expression construct encoding a tumor neoantigenic peptide of the present disclosure. Typically the population of APCs is pulsed or loaded, modified to express or comprises at least one, at least 5, at least 10, at least 15, or at least 20 different neoantigenic peptide or expression construct encoding it.

[0217] The present disclosure also encompasses compositions comprising APCs as herein disclosed. APCs can be suspended in any known physiologically compatible pharmaceutical carrier, such as cell culture medium, physiological saline, phosphate-buffered saline, cell culture medium, or the like, to form a physiologically acceptable, aqueous pharmaceutical composition. Parenteral vehicles include sodium chloride solution, Ringer's dextrose, dextrose and sodium chloride, lactated Ringer's. Other substances may be added as desired such as antimicrobials. As used herein, a “carrier” refers to any substance suitable as a vehicle for delivering an APC to a suitable in vitro or in vivo site of action. As such, carriers can act as an excipient for formulation of a therapeutic or experimental reagent containing an APC. Preferred carriers are capable of maintaining an APC in a form that is capable of interacting with a T cell. Examples of such carriers include, but are not limited to water, phosphate buffered saline, saline, Ringer's solution, dextrose solution, serum-containing solutions, Hank's solution and other aqueous physiologically balanced solutions or cell culture medium. Aqueous carriers can also contain suitable auxiliary substances required to approximate the physiological conditions of the recipient, for example, enhancement of chemical stability and isotonicity. Suitable auxiliary substances include, for example, sodium acetate, sodium chloride, sodium lactate, potassium chloride, calcium chloride, sorbitan monolaurate, triethanolamine oleate, and other substances used to produce phosphate buffer, Tris buffer, and bicarbonate buffer.

[0218] Vaccine Compositions

[0219] The present disclosure further encompasses a vaccine or immunogenic composition capable of raising a specific T-cell response comprising:
[0220] one or more neoantigenic peptides as herein defined,
[0221] one or more polynucleotides encoding a neoantigenic peptide as herein defined; and/or
[0222] a population of antigen presenting cells (such as autologous dendritic cells or artificial APC) as described above.

[0223] A suitable vaccine or immunogenic composition will preferably contain between 1 and 20 neoantigenic peptides, more preferably 2, 3, 4, 5, 6, 7, 8, 9, 10, 11, 12, 13, 14, 15, 16, 17, 18, 19, 20, 21, 22, 23, 24, 25 different neoantigenic peptides, further preferred 6, 7, 8, 9, 10 11, 12, 13, or 14 different neoantigenic peptides, and most preferably 12, 13 or 14 different neoantigenic peptides.

[0224] The neoantigenic peptide(s) may be linked to a carrier protein. Where the composition contains two or more neoantigenic peptides, the two or more (e.g. 2-25) peptides may be linearly linked by a spacer molecule as described above, e.g. a spacer comprising 2-6 nonpolar or neutral amino acids.

[0225] In one embodiment of the present disclosure the different neoantigenic peptides, encoding polynucleotides, vectors, or APCs are selected so that one vaccine or immunogenic composition comprises neoantigenic peptides capable of associating with different MEW molecules, such as different MEW class I molecules. Preferably, such neoantigenic peptides are capable of associating with the most frequently occurring MEW class I molecules, e.g. different fragments capable of associating with at least 2 preferred, more preferably at least 3 preferred, even more preferably at least 4 preferred MEW class I molecules. In some embodiments, the compositions comprise peptides, encoding polynucleotides, vectors, or APCs capable of associating with one or more MEW class II molecules. The MEW is optionally HLA-A, -B, -C, -DP, -DQ, or -DR.

[0226] The vaccine or immunogenic composition is capable of raising a specific cytotoxic T-cells response and/or a specific helper T-cell response.

[0227] Thus in a particular embodiment, the present disclosure also relates to a neoantigenic peptide as described above, wherein the neoantigenic peptide has a tumor specific neoepitope and is included in a vaccine or immunogenic composition. A vaccine composition is to be understood as meaning a composition for generating immunity for the prophylaxis and/or treatment of diseases. Accordingly, vaccines are medicines which comprise or generate antigens and are intended to be used in humans or animals for generating specific defense and protective substance by vaccination. An “immunogenic composition” is to be understood as meaning a composition that comprises or generates antigen(s) and is capable of eliciting an antigen-specific humoral or cellular immune response, e.g. T-cell response.

[0228] In a preferred embodiment, the neoantigenic peptide according to the disclosure is 8 or 9 residues long, or from 13 to 25 residues long. When the peptide is less than 20 residues, in order to have a peptide better suited for in vivo immunization, said neoantigenic peptide, is optionally flanked by additional amino acids to obtain an immunization peptide of more amino acids, usually more than 20.

[0229] Pharmaceutical compositions (i.e., the vaccine or immunogenic composition) comprising a peptide as herein described may be administered to an individual already suffering from a cancer or a tumor. In therapeutic applications, compositions are administered to a patient in an amount sufficient to elicit an effective CTL response to the tumor antigen and to cure or at least partially arrest symptoms and/or complications. An amount adequate to accomplish this is defined as “therapeutically effective dose.” Amounts effective for this use will depend on, e.g., the peptide composition, the manner of administration, the stage and severity of the disease being treated, the weight and general state of health of the patient, and the judgment of the prescribing physician, but generally range for the initial immunization (that is for therapeutic or prophylactic administration) from about 1.0 μg to about 50,000 μg of peptide for a 70 kg patient, followed by boosting dosages or from about 1.0 μg to about 10,000 μg of peptide pursuant to a boosting regimen over weeks to months depending upon the patient's response and condition by measuring specific CTL activity in the patient's blood. It must be kept in mind that the peptide and compositions of the present invention may generally be employed in serious disease states, that is, life-threatening or potentially life threatening situations, especially when the cancer has metastasized. In such cases, in view of the minimization of extraneous substances and the relative nontoxic nature of the peptide, it is possible and may be felt desirable by the treating physician to administer substantial excesses of these peptide compositions.

[0230] For therapeutic use, administration should begin at the detection or surgical removal of tumors. This is followed by boosting doses until at least symptoms are substantially abated and for a period thereafter.

[0231] The vaccine or immunogenic compositions for therapeutic treatment are intended for parenteral, topical, nasal, oral or local administration. Preferably, the pharmaceutical compositions are administered parenterally, e.g., intravenously, subcutaneously, intradermally, or intramuscularly. The compositions may be administered at the site of surgical excision to induce a local immune response to the tumor.

[0232] The vaccine or immunogenic composition may be a pharmaceutical composition which additionally comprises a pharmaceutically acceptable adjuvant, immunostimulatory agent, stabilizer, carrier, diluent, excipient and/or any other materials well known to those skilled in the art. Such materials should be non-toxic and should not interfere with the efficacy of the active ingredient. The carrier is preferably an aqueous carrier but its precise nature of the carrier or other material will depend on the route of administration. A variety of aqueous carriers may be used, e.g., water, buffered water, 0.9% saline, 0.3% glycine, hyaluronic acid and the like. These compositions may be sterilized by conventional, well known sterilization techniques, or may be sterile filtered. The resulting aqueous solutions may be packaged for use as is, or lyophilized, the lyophilized preparation being combined with a sterile solution prior to administration. The compositions may further contain pharmaceutically acceptable auxiliary substances as required to approximate physiological conditions, such as pH adjusting and buffering agents, tonicity adjusting agents, wetting agents and the like, for example, sodium acetate, sodium lactate, sodium chloride, potassium chloride, calcium chloride, sorbitan monolaurate, triethanolamine oleate, etc. See, for example, Butterfield, B M J. 2015 22; 350 for a discussion of cancer vaccines.

[0233] Example adjuvants that increase or expand the immune response of a host to an antigenic compound include emulsifiers, muramyl dipeptides, avridine, aqueous adjuvants such as aluminum hydroxide, chitosan-based adjuvants, saponins, oils, Amphigen, LPS, bacterial cell wall extracts, bacterial DNA, CpG sequences, synthetic oligonucleotides, cytokines and combinations thereof. Emulsifier include, for example, potassium, sodium and ammonium salts of lauric and oleic acid, calcium, magnesium and aluminum salts of fatty acids, organic sulfonates such as sodium lauryl sulfate, cetyltrhethylammonlum bromide, glycerylesters, polyoxyethylene glycol esters and ethers, and sorbitan fatty acid esters and their polyoxyethylene, acacia, gelatin, lecithin and/or cholesterol. Adjuvants that comprise an oil component include mineral oil, a vegetable oil, or an animal oil. Other adjuvants include Freund's Complete Adjuvant (FCA) or Freund's Incomplete Adjuvant (FIA). Cytokines useful as additional immunostimulatory agents include interferon alpha, interleukin-2 (IL-2), and granulocyte macrophage-colony stimulating factor (GM-CSF), or combinations thereof.

[0234] The concentration of peptides as herein described in the vaccine or immunogenic formulations can vary widely, i.e., from less than about 0.1%, usually at or at least about 2% to as much as 20% to 50% or more by weight, and will be selected primarily by fluid volumes, viscosities, etc., in accordance with the particular mode of administration selected.

[0235] The peptides as herein described may also be administered via liposomes, which target the peptides to a particular cells tissue, such as lymphoid tissue. Liposomes are also useful in increasing the half-life of the peptides. Liposomes include emulsions, foams, micelles, insoluble monolayers, liquid crystals, phospholipid dispersions, lamellar layers and the like. In these preparations the peptide to be delivered is incorporated as part of a liposome, alone or in conjunction with a molecule which binds to, e.g., a receptor prevalent among lymphoid cells, such as monoclonal antibodies which bind to the CD45 antigen, or with other therapeutic or immunogenic compositions. Thus, liposomes filled with a desired peptide of the invention can be directed to the site of lymphoid cells, where the liposomes then deliver the selected therapeutic/immunogenic peptide compositions. Liposomes for use in the invention are formed from standard vesicle-forming lipids, which generally include neutral and negatively charged phospholipids and a sterol, such as cholesterol. The selection of lipids is generally guided by consideration of, e.g., liposome size, acid lability and stability of the liposomes in the blood stream. A variety of methods are available for preparing liposomes, as described in, e.g., Szoka et al., Ann. Rev. Biophys. Bioeng. 9; 467 (1980), U.S. Pat. Nos. 4,235,871; 4,501,728; 4,837,028; and 5,019,369.

[0236] For targeting to the immune cells, a ligand to be incorporated into the liposome can include, e.g., antibodies or fragments thereof specific for cell surface determinants of the desired immune system cells. A liposome suspension containing a peptide may be administered intravenously, locally, topically, etc. in a dose which varies according to, inter alia, the manner of administration, the peptide being delivered, and the stage of the disease being treated.

[0237] For solid compositions, conventional or nanoparticle nontoxic solid carriers may be used which include, for example, pharmaceutical grades of mannitol, lactose, starch, magnesium stearate, sodium saccharin, talcum, cellulose, glucose, sucrose, magnesium carbonate, and the like. For oral administration, a pharmaceutically acceptable nontoxic composition is formed by incorporating any of the normally employed excipients, such as those carriers previously listed, and generally 10-95% of active ingredient, that is, one or more peptides of the invention, and more preferably at a concentration of 25%-75%.

[0238] For aerosol administration, the immunogenic peptides are preferably supplied in finely divided form along with a surfactant and propellant. Typical percentages of peptides are 0.01%-20% by weight, preferably 1%-10%. The surfactant must, of course, be nontoxic, and preferably soluble in the propellant. Representative of such agents are the esters or partial esters of fatty acids containing from 6 to 22 carbon atoms, such as caproic, octanoic, lauric, palmitic, stearic, linoleic, linolenic, olesteric and oleic acids with an aliphatic polyhydric alcohol or its cyclic anhydride. Mixed esters, such as mixed or natural glycerides may be employed. The surfactant may constitute 0.1%-20% by weight of the composition, preferably 0.25-5%. The balance of the composition is ordinarily propellant. A carrier can also be included as desired, as with, e.g., lecithin for intranasal delivery.

[0239] Cytotoxic T-cells (CTLs) recognize an antigen in the form of a peptide bound to an MEW molecule rather than the intact foreign antigen itself. The MEW molecule itself is located at the cell surface of an antigen presenting cell. Thus, an activation of CTLs is only possible if a trimeric complex of peptide antigen, MEW molecule, and antigen presenting cell (APC) is present. Correspondingly, it may enhance the immune response if not only the peptide is used for activation of CTLs, but if additionally APCs with the respective MEW molecule are added. Therefore, in some embodiments the vaccine or immunogenic composition according to the present disclosure alternatively or additionally contains at least one antigen presenting cell, preferably a population of APCs.

[0240] The vaccine or immunogenic composition may thus be delivered in the form of a cell, such as an antigen presenting cell, for example as a dendritic cell vaccine. The antigen presenting cells such as a dendritic cell may be pulsed or loaded with a neoantigenic peptide as herein disclosed, may comprise an expression construct encoding a neoantigenic peptide as herein disclosed, or may be genetically modified (via DNA or RNA transfer) to express one, two or more of the herein disclosed neoantigenic peptides, for example at least 2, 3, 4, 5, 6, 7, 8, 9, or 10 neoantigenic peptides.

[0241] Suitable vaccines or immunogenic compositions may also be in the form of DNA or RNA relating to neoantigenic peptides as described herein. For example, DNA or RNA encoding one or more neoantigenic peptides or proteins derived therefrom may be used as the vaccine, for example by direct injection to a subject. For example, DNA or RNA encoding at least 2, 3, 4, 5, 6, 7, 8, 9, 10, 11, 12, 13, 14, 15, 16, 17, 18, 19, 20, 21, 22, 23, 24 or 25 neoantigenic peptides or proteins derived therefrom.

[0242] A number of methods are conveniently used to deliver the nucleic acids to the patient. For instance, the nucleic acid can be delivered directly, as “naked DNA”. This approach is described, for instance, in Wolff et al., Science 247: 1465-1468 (1990) as well as U.S. Pat. Nos. 5,580,859 and 5,589,466. The nucleic acids can also be administered using ballistic delivery as described, for instance, in U.S. Pat. No. 5,204,253. Particles comprised solely of DNA can be administered. Alternatively, DNA can be adhered to particles, such as gold particles.

[0243] The nucleic acids can also be delivered complexed to cationic compounds, such as cationic lipids. Lipid-mediated gene delivery methods are described, for instance, in WO 96/18372; WO 93/24640; Mannino & Gould-Fogerite, BioTechniques 6(7): 682-691 (1988); U.S. Pat. No. 5,279,833; WO 91/06309; and Felgner et al., Proc. Natl. Acad. Sci. USA 84: 7413-7414 (1987).

[0244] Delivery systems may optionally include cell-penetrating peptides, nanoparticulate encapsulation, virus like particles, liposomes, or any combination thereof. Cell penetrating peptides include TAT peptide, herpes simplex virus VP22, transportan, Antp. Liposomes may be used as a delivery system. Listeria vaccines or electroporation may also be used.

[0245] The one or more neoantigenic peptides may also be delivered via a bacterial or viral vector containing DNA or RNA sequences which encode one or more neoantigenic peptides. The DNA or RNA may be delivered as a vector itself or within attenuated bacteria virus or live attenuated virus, such as vaccinia or fowlpox. This approach involves the use of vaccinia virus as a vector to express nucleotide sequences that encode the peptide of the invention. Upon introduction into an acutely or chronically infected host or into a noninfected host, the recombinant vaccinia virus expresses the immunogenic peptide, and thereby elicits a host CTL response. Vaccinia vectors and methods useful in immunization protocols are described in, e.g., U.S. Pat. No. 4,722,848. Another vector is BCG (Bacille Calmette Guerin). BCG vectors are described in Stover et al. (Nature 351:456-460 (1991)). A wide variety of other vectors useful for therapeutic administration or immunization of the peptides of the invention, e.g., Salmonella typhivectors and the like, will be apparent to those skilled in the art from the description herein.

[0246] An appropriate mean of administering nucleic acids encoding the peptides as herein described involves the use of minigene constructs encoding multiple epitopes. To create a DNA sequence encoding the selected CTL epitopes (minigene) for expression in human cells, the amino acid sequences of the epitopes are reverse translated. A human codon usage table is used to guide the codon choice for each amino acid. These epitope-encoding DNA sequences are directly adjoined, creating a continuous polypeptide sequence. To optimize expression and/or immunogenicity, additional elements can be incorporated into the minigene design. Examples of amino acid sequence that could be reverse translated and included in the minigene sequence include: helper T lymphocyte, epitopes, a leader (signal) sequence, and an endoplasmic reticulum retention signal. In addition, MEW presentation of CTL epitopes may be improved by including synthetic (e.g. poly-alanine) or naturally-occurring flanking sequences adjacent to the CTL epitopes.

[0247] The minigene sequence is converted to DNA by assembling oligonucleotides that encode the plus and minus strands of the minigene. Overlapping oligonucleotides (30-100 bases long) are synthesized, phosphorylated, purified and annealed under appropriate conditions using well known techniques. The ends of the oligonucleotides are joined using T4 DNA ligase. This synthetic minigene, encoding the CTL epitope polypeptide, can then cloned into a desired expression vector.

[0248] Standard regulatory sequences well known to those of skill in the art are included in the vector to ensure expression in the target cells. Thus, the DNA or RNA encoding the neoantigenic peptide(s) may typically be operably linked to one or more of:
[0249] a promoter that can be used to drive nucleic acid molecule expression. AAV ITR can serve as a promoter and is advantageous for eliminating the need for an additional promoter element. For ubiquitous expression, the following promoters can be used: CMV (notably human cytomegalovirus immediate early promoter (hCMV-IE)), CAG, CBh, PGK, SV40, RSV, Ferritin heavy or light chains, etc. For brain expression, the following promoters can be used: Synapsin1 for all neurons, CaMKIIalpha for excitatory neurons, GAD67 or GAD65 or VGAT for GABAergic neurons, etc. Promoters used to drive RNA synthesis can include: Pol III promoters such as U6 or HI. The use of a Pol II promoter and intronic cassettes can be used to express guide RNA (gRNA). Typically, the promoter includes a down-stream cloning site for minigene insertion. For examples of suitable promoters sequences, see notably U.S. Pat. Nos. 5,580,859 and 5,589,466.
[0250] Transcriptional transactivators or other enhancer elements, which can also increase transcription activity, e.g. the regulatory R region from the 5′ long terminal repeat (LTR) of human T-cell leukemia virus type 1 (HTLV-1) (which when combined with a CMV promoter has been shown to induce higher cellular immune response).
[0251] Translation optimizing sequences e.g. a Kozak sequence flanking the AUG initiator codon (ACCAUGG) within mRNA, and codon optimization.

[0252] Additional vector modifications may be desired to optimize minigene expression and immunogenicity. In some cases, introns are required for efficient gene expression, and one or more synthetic or naturally-occurring introns could be incorporated into the transcribed region of the minigene. The inclusion of mRNA stabilization sequences can also be considered for increasing minigene expression. It has recently been proposed that immunostimulatory sequences (ISSs or CpGs) play a role in the immunogenicity of DNA′ vaccines. These sequences could be included in the vector, outside the minigene coding sequence, if found to enhance immunogenicity.

[0253] In some embodiments, a bicistronic expression vector, to allow production of the minigene-encoded epitopes and a second protein included to enhance or decrease immunogenicity can be used.

[0254] DNA vaccines or immunogenic compositions as herein described can be enhanced by co-delivering cytokines that promote cell-mediated immune responses, such as IL-2, IL-12, IL-18, GM-CSF and IFNγ. CXC chemokines such as IL-8, and CC chemokines such as macrophage inflammatory protein (MIP)-1α, MIP-3α, MIP-3β, and RANTES, may increase the potency of the immune response. DNA vaccine immunogenicity can also be enhanced by co-delivering plasmid-encoded cytokine-inducing molecules (e.g. LeIF), co-stimulatory and adhesion molecules, e.g. B7-1 (CD80) and/or B7-2 (CD86). Helper (HTL) epitopes could be joined to intracellular targeting signals and expressed separately from the CTL epitopes. This would allow direction of the HTL epitopes to a cell compartment different than the CTL epitopes. If required, this could facilitate more efficient entry of HTL epitopes into the MHC class II pathway, thereby improving CTL induction. In contrast to CTL induction, specifically decreasing the immune response by co-expression of immunosuppressive molecules (e.g. TGF-β) may be beneficial in certain diseases.

[0255] Once an expression vector is selected, the minigene is cloned into the polylinker region downstream of the promoter. This plasmid is transformed into an appropriate E. coli strain, and DNA is prepared using standard techniques. The orientation and DNA sequence of the minigene, as well as all other elements included in the vector, are confirmed using restriction mapping and DNA sequence analysis. Bacterial cells harboring the correct plasmid can be stored as a master cell bank and a working cell bank.

[0256] Purified plasmid DNA can be prepared for injection using a variety of formulations. The simplest of these is reconstitution of lyophilized DNA in sterile phosphate-buffer saline (PBS). A variety of methods have been described, and new techniques may become available. As noted above, nucleic acids are conveniently formulated with cationic lipids. In addition, glycolipids, fusogenic liposomes, peptides and compounds referred to collectively as protective, interactive, non-condensing (PINC) could also be complexed to purified plasmid DNA to influence variables such as stability, intramuscular dispersion, or trafficking to specific organs or cell types.

[0257] Vaccines or immunogenic compositions comprising peptides may be administered in combination with vaccines or immunogenic compositions comprising polynucleotide encoding the peptides. For example, administration of peptide vaccine and DNA vaccine may be alternated in a prime-boost protocol. For example, priming with a peptide immunogenic composition and boosting with a DNA immunogenic composition is contemplated, as is priming with a DNA immunogenic composition and boosting with a peptide immunogenic composition.

[0258] The present disclosure also encompasses a method for producing a vaccine composition comprising the steps of:
[0259] a) Optionally, identifying at least one neoantigenic peptide according to the method as previously described;
[0260] b) producing said at least one neoantigenic peptide, at least one polypeptide encoding neoantigenic peptide(s), or at least a vector comprising said polypeptide(s) as described herein; and
[0261] c) optionally adding physiologically acceptable buffer, excipient and/or adjuvant and producing a vaccine with said at least one neoantigenic peptide, polypeptide or vector.

[0262] Another aspect of the present disclosure is a method for producing a DC vaccine, wherein said DCs present at least one neoantigenic peptide as herein disclosed.

[0263] Antibodies TCRs, CARs and Derivatives Thereof

[0264] The present disclosure also relates to an antibody or an antigen-binding fragment thereof that specifically binds a neoantigenic peptide as herein defined.

[0265] In some embodiments, the neoantigenic peptide is in association with an MHC or HLA molecule.

[0266] Typically, said antibody, or antigen-binding fragment thereof binds a neoantigenic peptide as herein defined, alone or optionally in association with an MHC or HLA molecule, with a Kd binding affinity of 10⁻⁷ M or less, 10⁻⁸ M or less, 10⁻⁹ M or less, 10⁻¹⁰ M or less, or 10⁻¹¹ M or less.

[0267] To promote the infiltration and recognition of tumor cells by lymphocytes T (LT), another strategy consists in using antibodies capable of recognizing more than one antigenic target simultaneously and more particularly two antigenic targets simultaneously. There are many formats of bispecific antibodies. BiTE (bi-specific T-cell engager) are the first to have been developed. These are proteins of fusion consisting of two scFvs (variable domains heavy VH and light VL chains) from two antibodies linked by a binding peptide: one recognizes the LT marker (CD3+) and the other a tumor antigen. The goal is to favor recruitment and activation of LTs in contact with tumor, thus leading to cell lysis tumor (See for review Patrick A. Baeuerle and Carsten Reinhardt; Bispecific T-Cell Engaging Antibodies for Cancer Therapy; Cancer Res 2009; 69: (12). Jun. 15, 2009; and Galaine et al., Innovations & Thérapeutiques en Oncologie, vol. 3-n° 3-7, mai-août 2017).

[0268] In a particular embodiment, said antibody is a bi-specific T-cell engager that targets a tumor neoantigenic peptide as herein defined, optionally in association with a MHC or an HLA molecule and which further targets at least an immune cell antigen. Typically, the immune cell is a T cell, a NK cell or a dendritic cell. In this context, the targeted immune cell antigen may be for example CD3, CD16, CD30 or a TCR.

[0269] The term “antibody” herein is used in the broadest sense and includes polyclonal and monoclonal antibodies, including intact antibodies and functional (antigen-binding) antibody fragments, including fragment antigen binding (Fab) fragments, F(ab′)2 fragments, Fab′ fragments, Fv fragments, recombinant IgG (rlgG) fragments, variable heavy chain (VH) regions capable of specifically binding the antigen, single chain antibody fragments, including single chain variable fragments (scFv), and single domain antibodies (e.g., VHH antibodies, sdAb, sdFv, nanobody) fragments. The term encompasses genetically engineered and/or otherwise variants modified forms of immunoglobulins, such as intrabodies, peptibodies, chimeric antibodies, fully human antibodies, humanized antibodies, and heteroconjugate antibodies, multispecific, e.g., bispecific, antibodies, diabodies, triabodies, and tetrabodies, tandem di-scFv, tandem tri-scFv. Unless otherwise stated, the term “antibody” should be understood to encompass functional antibody and fragments thereof. The term also encompasses intact or full-length antibodies, including antibodies of any class or sub-class, including IgG and sub-classes thereof, IgG1, IgG2, IgG3, IgG4, IgM, IgE, IgA, and IgD. In some embodiments, the antibody comprises a light chain variable domain and a heavy chain variable domain, e.g. in an scFv format.

[0270] Antibodies include variant polypeptide species that have one or more amino acid substitutions, insertions, or deletions in the native amino acid sequence, provided that the antibody retains or substantially retains its specific binding function. Conservative substitutions of amino acids are well known and described above.

[0271] The present disclosure further includes a method of producing an antibody, or antigen-binding fragment thereof, comprising a step of selecting antibodies that bind to a tumor neoantigen peptide as herein defined, optionally in association with an MHC or HLA molecule, with a Kd binding affinity of about 10⁻⁶ M or less, 10⁻⁷ M or less, 10⁻⁸ M or less, 10⁻⁹ M or less, 10⁻¹⁰ M or less, or 10⁻¹¹ M or less.

[0272] In some embodiments, the antibodies are selected from a library of human antibody sequences. In some embodiments, the antibodies are generated by immunizing an animal with a polypeptide comprising the neoantigenic peptide, optionally in association with an MHC or HLA molecule, followed by the selection step.

[0273] Antibodies including chimeric, humanized or human antibodies can be further affinity matured and selected as described above. Humanized antibodies contain rodent-sequence derived CDR regions; typically the rodent CDRs are engrafted into a human framework, and some of the human framework residues may be back-mutated to the original rodent framework residue to preserve affinity, and/or one or a few of the CDR residues may be mutated to increase affinity. Fully human antibodies have no murine sequence, and are typically produced via phage display technologies of human antibody libraries, or immunization of transgenic mice whose native immunoglobin loci have been replaced with segments of human immunoglobulin loci.

[0274] Antibodies produced by said method, as well as immune cells expressing such antibodies or fragments thereof are also encompassed by the present disclosure.

[0275] The present disclosure also encompasses pharmaceutical compositions comprising one or more antibodies as herein disclosed alone or in combination with at least one other agent, such as a stabilizing compound, which may be administered in any sterile, biocompatible pharmaceutical carrier and optionally formulated with formulated with sterile pharmaceutically acceptable buffer(s), diluent(s), and/or excipient(s). Pharmaceutically acceptable carriers typically enhance or stabilize the composition, and/or can be used to facilitate preparation of the composition. Pharmaceutically acceptable carriers include solvents, dispersion media, coatings, antibacterial and antifungal agents, isotonic and absorption delaying agents, and the like that are physiologically compatible and in some embodiments pharmaceutically inert.

[0276] Administration of pharmaceutical composition comprising antibodies as herein disclosed can be accomplished orally or parenterally. Methods of parenteral delivery include topical, intra-arterial (directly to the tumor), intramuscular, spinal, subcutaneous, intramedullary, intrathecal, intraventricular, intravenous, intraperitoneal, or intranasal administration.

[0277] Thus, in addition to the active ingredients, these pharmaceutical compositions may contain suitable pharmaceutically acceptable carriers comprising excipients and auxiliaries which facilitate processing of the active compounds into preparations which can be used pharmaceutically. Further details on techniques for formulation and administration may be found in the latest edition of Remington's Pharmaceutical Sciences (Ed. Maack Publishing Co, Easton, Pa.).

[0278] Depending on the route of administration, the active compound, i.e., antibody, bispecific and multispecific molecule, may be coated in a material to protect the compound from the action of acids and other natural conditions that may inactivate the compound.

[0279] The composition is typically sterile and preferably fluid. Proper fluidity can be maintained, for example, by use of coating such as lecithin, by maintenance of required particle size in the case of dispersion and by use of surfactants. In many cases, it is preferable to include isotonic agents, for example, sugars, polyalcohols such as mannitol or sorbitol, and sodium chloride in the composition. Long-term absorption of the injectable compositions can be brought about by including in the composition an agent which delays absorption, for example, aluminum monostearate or gelatin.

[0280] Pharmaceutical compositions for oral administration can be formulated using pharmaceutically acceptable carriers well known in the art in dosages suitable for oral administration. Such carriers enable the pharmaceutical compositions to be formulated as tablets, pills, dragees, capsules, liquids, gels, syrups, slurries, suspensions and the like, for ingestion by the patient.

[0281] Pharmaceutical compositions of the disclosure can be prepared in accordance with methods well known and routinely practiced in the art. See. e.g., Remington: The Science and Practice of Pharmacy, Mack Publishing Co., 20th ed., 2000; and Sustained and Controlled Release Drug Delivery Systems, J R. Robinson, ed., Marcel Dekker, Inc., New York, 1978. Pharmaceutical compositions are preferably manufactured under GMP conditions.

[0282] The present disclosure also encompasses a T cell receptor (TCR) that targets a neoantigenic peptide as herein defined in association with an MHC or HLA molecule.

[0283] The present disclosure further includes a method of producing a TCR, or an antigen-binding fragment thereof, comprising a step of selecting TCRs that bind to a tumor neoantigen peptide as herein defined, optionally in association with an MHC or HLA molecule, optionally with a Kd binding affinity of about 10⁻⁶ M or less, 10⁻⁷ M or less, 10⁻⁸ M or less, 10⁻⁹ M or less, 10⁻¹⁰ M or less, or 10⁻¹¹M or less.

[0284] Nucleic acid encoding the TCR can be obtained from a variety of sources, such as by polymerase chain reaction (PCR) amplification of naturally occurring TCR DNA sequences, followed by expression of antibody variable regions, followed by the selecting step described above. In some embodiments, the TCR is obtained from T-cells isolated from a patient, or from cultured T-cell hybridomas. In some embodiments, the TCR clone for a target antigen has been generated in transgenic mice engineered with human immune system genes (e.g., the human leukocyte antigen system, or HLA). See, e.g., tumor antigens (see, e.g., Parkhurst et al. (2009) Clin Cancer Res. 15:169-180 and Cohen et al. (2005) J Immunol. 175:5799-5808. In some embodiments, phage display is used to isolate TCRs against a target antigen (see, e.g., Varela-Rohena et al. (2008) Nat Med. 14:1390-1395 and Li (2005) Nat Biotechnol. 23:349-354.

[0285] A “T cell receptor” or “TCR” refers to a molecule that contains a variable α and β chains (also known as TCRa and TCRp, respectively) or a variable γ and δ chains (also known as TCRy and TCRS, respectively) and that is capable of specifically binding to an antigen peptide bound to a MHC receptor. In some embodiments, the TCR is in the αβ form. Typically, TCRs that exist in αβ and γδ forms are generally structurally similar, but T cells expressing them may have distinct anatomical locations or functions. A TCR can be found on the surface of a cell or in soluble form. Generally, a TCR is found on the surface of T cells (or T lymphocytes) where it is generally responsible for recognizing antigens bound to major histocompatibility complex (MHC) molecules. In some embodiments, a TCR also can contain a constant domain, a transmembrane domain and/or a short cytoplasmic tail (see, e.g., Janeway et ah, Immunobiology: The Immune System in Health and Disease, 3 rd Ed., Current Biology Publications, p. 4:33, 1997). For example, in some aspects, each chain of the TCR can possess one N-terminal immunoglobulin variable domain, one immunoglobulin constant domain, a transmembrane region, and a short cytoplasmic tail at the C-terminal end. In some embodiments, a TCR is associated with invariant proteins of the CD3 complex involved in mediating signal transduction. Unless otherwise stated, the term “TCR” should be understood to encompass functional TCR fragments thereof. The term also encompasses intact or full-length TCRs, including TCRs in the αβ form or γδ form.

[0286] Thus, for purposes herein, reference to a TCR includes any TCR or functional fragment, such as an antigen-binding portion of a TCR that binds to a specific antigenic peptide bound in an MHC molecule, i.e. MHC-peptide complex. An “antigen-binding portion” or antigen-binding fragment” of a TCR, which can be used interchangeably, refers to a molecule that contains a portion of the structural domains of a TCR, but that binds the antigen (e.g. MHC-peptide complex) to which the full TCR binds. In some cases, an antigen-binding portion contains the variable domains of a TCR, such as variable a chain and variable 0 chain of a TCR, sufficient to form a binding site for binding to a specific MHC-peptide complex, such as generally where each chain contains three complementarity determining regions.

[0287] In some embodiments, the variable domains of the TCR chains associate to form loops, or complementarity determining regions (CDRs) analogous to immunoglobulins, which confer antigen recognition and determine peptide specificity by forming the binding site of the TCR molecule and determine peptide specificity. Typically, like immunoglobulins, the CDRs are separated by framework regions (FRs) {see, e.g., Jores et al., Pwc. Nat'l Acad. Sci. U.S.A. 87:9138, 1990; Chothia et al., EMBO J. 7:3745, 1988; see also Lefranc et al., Dev. Comp. Immunol. 27:55, 2003). In some embodiments, CDR3 is the main CDR responsible for recognizing processed antigen, although CDR1 of the alpha chain has also been shown to interact with the N-terminal part of the antigenic peptide, whereas CDR1 of the beta chain interacts with the C-terminal part of the peptide. CDR2 is thought to recognize the MHC molecule. In some embodiments, the variable region of the β-chain can contain a further hypervariability (HV4) region.

[0288] In some embodiments, the TCR chains contain a constant domain. For example, like immunoglobulins, the extracellular portion of TCR chains {e.g., a-chain, β-chain) can contain two immunoglobulin domains, a variable domain {e.g., Va or Vp; typically amino acids 1 to 116 based on Kabat numbering Kabat et al., “Sequences of Proteins of Immunological Interest, US Dept. Health and Human Services, Public Health Service National Institutes of Health, 1991, 5th ed.) at the N-terminus, and one constant domain {e.g., a-chain constant domain or Ca, typically amino acids 117 to 259 based on Kabat, β-chain constant domain or Cp, typically amino acids 117 to 295 based on Kabat) adjacent to the cell membrane. For example, in some cases, the extracellular portion of the TCR formed by the two chains contains two membrane-proximal constant domains, and two membrane-distal variable domains containing CDRs. The constant domain of the TCR domain contains short connecting sequences in which a cysteine residue forms a disulfide bond, making a link between the two chains. In some embodiments, a TCR may have an additional cysteine residue in each of the α and β chains such that the TCR contains two disulfide bonds in the constant domains.

[0289] In some embodiments, the TCR chains can contain a transmembrane domain. In some embodiments, the transmembrane domain is positively charged. In some cases, the TCR chains contain a cytoplasmic tail. In some cases, the structure allows the TCR to associate with other molecules like CD3. For example, a TCR containing constant domains with a transmembrane region can anchor the protein in the cell membrane and associate with invariant subunits of the CD3 signaling apparatus or complex.

[0290] Generally, CD3 is a multi-protein complex that can possess three distinct chains (γ, δ, and ε) in mammals and the ζ-chain. For example, in mammals the complex can contain a CD3y chain, a CD35 chain, two CD3s chains, and a homodimer of CD3ζ chains. The CD3y, CD35, and CD3s chains are highly related cell surface proteins of the immunoglobulin superfamily containing a single immunoglobulin domain. The transmembrane regions of the CD3y, CD35, and CD3s chains are negatively charged, which is a characteristic that allows these chains to associate with the positively charged T cell receptor chains. The intracellular tails of the CD3y, CD35, and CD3s chains each contain a single conserved motif known as an immunoreceptor tyrosine-based activation motif or ITAM, whereas each CD3 chain has three. Generally, ITAMs are involved in the signaling capacity of the TCR complex. These accessory molecules have negatively charged transmembrane regions and play a role in propagating the signal from the TCR into the cell. The CD3- and ζ-chains, together with the TCR, form what is known as the T cell receptor complex.

[0291] In some embodiments, the TCR may be a heterodimer of two chains α and β (or optionally γ and δ) or it may be a single chain TCR construct. In some embodiments, the TCR is a heterodimer containing two separate chains (α and β chains or γ and δ chains) that are linked, such as by a disulfide bond or disulfide bonds.

[0292] While T-cell receptors (TCRs) are transmembrane proteins and do not naturally exist in soluble form, antibodies can be secreted as well as membrane bound. Importantly, TCRs have the advantage over antibodies that they in principle can recognize peptides generated from all degraded cellular proteins, both intra- and extracellular, when presented in the context of MHC molecules. Thus TCRs have important therapeutic potential.

[0293] The present disclosure also relates to soluble T-cell receptors (sTCRs) that contain the antigen recognition part directed against a tumor neoantigenic peptide as herein disclosed (see notably Walseng E, Wälchli S, Fallang L-E, Yang W, Vefferstad A, Areffard A, et al. (2015) Soluble T-Cell Receptors Produced in Human Cells for Targeted Delivery. PLoS ONE 10(4): e0119559). In a particular embodiment, the soluble TCR can be fused to an antibody fragment directed to a T cell antigen, optionally wherein the targeted antigen is CD3 or CD16 (see for example Boudousquie, Caroline et al. “Polyfunctional response by ImmTAC (IMCgp100) redirected CD8+ and CD4+ T cells.” Immunology vol. 152, 3 (2017): 425-438. doi:10.1111/imm.12779).

[0294] The present disclosure also encompasses a chimeric antigen receptor (CAR) which is directed against a tumor neoantigenic peptide as herein disclosed. CARs are fusion proteins comprising an antigen-binding domain, typically derived from an antibody, linked to the signalling domain of the TCR complex. CARs can be used to direct immune cells such T-cells or NK cells against a tumor neoantigenic peptide as previously defined with a suitable antigen-binding domain selected.

[0295] The antigen-binding domain of a CAR is typically based on a scFv (single chain variable fragment) derived from an antibody. In addition to an N-terminal, extracellular antibody-binding domain, CARs typically may comprise a hinge domain, which functions as a spacer to extend the antigen-binding domain away from the plasma membrane of the immune effector cell on which it is expressed, a transmembrane (TM) domain, an intracellular signalling domain (e.g. the signalling domain from the zeta chain of the CD3 molecule (CD3) of the TCR complex, or an equivalent) and optionally one or more co-stimulatory domains which may assist in signalling or functionality of the cell expressing the CAR. Signalling domains from co-stimulatory molecules including CD28, OX-40 (CD134), and 4-1BB (CD137) can be added alone (second generation) or in combination (third generation) to enhance survival and increase proliferation of CAR modified T cells. Potential co-stimulatory domains also include ICOS-1, CD27, GITR, CD28, and DAP10.

[0296] Thus, the CAR may include
[0297] (1) In its extracellular portion, one or more antigen binding molecules, such as one or more antigen-binding fragment, domain, or portion of an antibody, or one or more antibody variable domains, and/or antibody molecules.
[0298] (2) In its transmembrane portion, a transmembrane domain derived from human T cell receptor-alpha or -beta chain, a CD3 zeta chain, CD28, CD3-epsilon, CD45, CD4, CD5, CD8, CD9, CD16, CD22, CD33, CD37, CD64, CD80, CD86, CD134, CD137, ICOS, CD154, or a GITR. In some embodiments, the transmembrane domain is derived from CD28, CD8 or CD3-zeta.
[0299] (3) One or more co-stimulatory domains, such as co-stimulatory domains derived from human CD28, 4-1BB (CD137), ICOS-1, CD27, OX 40 (CD137), DAP10, and GITR (AITR). In some embodiments, the CAR comprises co-stimulating domains of both CD28 and 4-1BB.
[0300] (4) In its intracellular signalling domain, an intracellular signalling domain comprising one or more ITAMs, for example, the intracellular signalling domain is CD3-zeta, or a variant thereof lacking one or two ITAMs (e.g. ITAM3 and ITAM2), or the intracellular signalling domain is derived from FcεRIγ.

[0301] The CAR can be designed to recognize tumor neoantigenic peptide alone or in association with an HLA or MEW molecule.

[0302] Exemplary antigen receptors, including CARs and recombinant TCRs, as well as methods for engineering and introducing the receptors into cells, include those described, for example, in international patent application publication numbers WO2000/14257, WO2013/126726, WO2012/129514, WO2014/031687, WO2013/166321, WO2013/071154, WO2013/123061 U.S. patent application publication numbers US2002131960, US2013287748, US20130149337, U.S. Pat. Nos. 6,451,995, 7,446,190, 8,252,592, 8,339,645, 8,398,282, 7,446,179, 6,410,319, 7,070,995, 7,265,209, 7,354,762, 7,446,191, 8,324,353, and 8,479,118, and European patent application number EP2537416, and/or those described by Sadelain et al., Cancer Discov. 2013 April; 3(4): 388-398; Davila et al. (2013) PLoS ONE 8(4): e61338; Turtle et al., Curr. Opin. Immunol., 2012 October; 24(5): 633-39; Wu et al., Cancer, 2012 Mar. 18(2): 160-75. In some aspects, the genetically engineered antigen receptors include a CAR as described in U.S. Pat. No. 7,446,190, and those described in International Patent Application Publication No.: WO2014/055668.

[0303] The present disclosure also encompasses polynucleotides encoding antibodies, antigen-binding fragments or derivatives thereof, TCRs and CARs as previously described as well as vector comprising said polynucleotide(s).

[0304] Immune Cells

[0305] The present disclosure further encompasses immune cells which target one or more tumor neoantigenic peptides as previously described.

[0306] As used herein, the term “immune cell” includes cells that are of hematopoietic origin and that play a role in the immune response. Immune cells include lymphocytes, such as B cells and T cells, natural killer cells, myeloid cells, such as monocytes, macrophages, eosinophils, mast cells, basophils, and granulocytes.

[0307] As used herein, the term “T cell” includes cells bearing a T cell receptor (TCR), in particular TCR directed against a tumor neoantigenic peptide as herein disclosed. T-cells according to the present disclosure can be selected from the group consisting of inflammatory T-lymphocytes, cytotoxic T-lymphocytes, regulatory T-lymphocytes, Mucosal-Associated Invariant T cells (MAIT), Yδ T cell, tumour infiltrating lymphocyte (TILs) or helper T-lymphocytes included both type 1 and 2 helper T cells and Th17 helper cells. In another embodiment, said cell can be derived from the group consisting of CD4+T-lymphocytes and CD8+T-lymphocytes. Said immune cells may originate from a healthy donor or from a subject suffering from a cancer, or a tumor.

[0308] Immune cells can be extracted from blood or derived from stem cells. The stem cells can be adult stem cells, embryonic stem cells, more particularly non-human stem cells, cord blood stem cells, progenitor cells, bone marrow stem cells, induced pluripotent stem cells, totipotent stem cells or hematopoietic stem cells. Representative human cells are CD34+ cells.

[0309] T-cells can be obtained from a number of non-limiting sources, including peripheral blood mononuclear cells, bone marrow, lymph node tissue, cord blood, thymus tissue, tissue from a site of infection, ascites, pleural effusion, spleen tissue, and tumors. In certain embodiments, T-cells can be obtained from a unit of blood collected from a subject using any number of techniques known to the skilled person, such as FICOLL™ separation. In one embodiment, cells from the circulating blood of a subject are obtained by apheresis. In certain embodiments, T-cells are isolated from PBMCs. PBMCs may be isolated from buffy coats obtained by density gradient centrifugation of whole blood, for instance centrifugation through a LYMPHOPREP™ gradient, a PERCOLL™ gradient or a FICOLL™ gradient. T-cells may be isolated from PBMCs by depletion of the monocytes, for instance by using CD14 DYNABEADS®. In some embodiments, red blood cells may be lysed prior to the density gradient centrifugation.

[0310] In another embodiment, said cell can be derived from a healthy donor, from a subject diagnosed with cancer or tumor, notably with Ewing sarcoma. The cell can be autologous or allogeneic.

[0311] In allogeneic immune cell therapy, immune cells are collected from healthy donors, rather than the patient. Typically these are HLA matched to reduce the likelihood of graft vs. host disease. Alternatively, universal ‘off the shelf’ products that may not require HLA matching comprise modifications designed to reduce graft vs. host disease, such as disruption or removal of the TCRαβ receptor. See Graham et al., Cells. 2018 October; 7(10): 155 for a review. Because a single gene encodes the alpha chain (TRAC) rather than the two genes encoding the beta chain, the TRAC locus is a typical target for removing or disrupting TCRαβ receptor expression. Alternatively, inhibitors of TCRαβ signalling may be expressed, e.g. truncated forms of CD3ζ can act as a TCR inhibitory molecule. Disruption or removal of HLA class I molecules has also been employed. For example, Torikai et al., Blood. 2013; 122:1341-1349 used ZFNs to knock out the HLA-A locus, while Ren et al., Clin. Cancer Res. 2017; 23:2255-2266 knocked out Beta-2 microglobulin (B2M), which is required for HLA class I expression. Ren et al. simultaneously knocked out TCRαβ, B2M and the immune-checkpoint PD1. Generally, the immune cells are activated and expanded to be utilized in the adoptive cell therapy. The immune cells as herein disclosed can be expanded in vivo or ex vivo. The immune cells, in particular T-cells can be activated and expanded generally using methods known in the art. Generally the T-cells are expanded by contact with a surface having attached thereto an agent that stimulates a CD3/TCR complex associated signal and a ligand that stimulates a co-stimulatory molecule on the surface of the T cells.

[0312] In one embodiment of the present disclosure, the immune cell can be modified to be directed to tumor neoantigenic peptides as previously defined. In a particular embodiment, said immune cell may express a recombinant antigen receptor directed to said neoantigenic peptide its cell surface. By “recombinant” is meant an antigen receptor which is not encoded by the cell in its native state, i.e. it is heterologous, non-endogenous. Expression of the recombinant antigen receptor can thus be seen to introduce new antigen specificity to the immune cell, causing the cell to recognise and bind a previously described peptide. The antigen receptor may be isolated from any useful source. In some embodiments, the cells comprise one or more nucleic acids introduced via genetic engineering that encode one or more antigen receptors, wherein the antigen include at least one tumor neoantigenic peptide as per the present disclosure.

[0313] Among the antigen receptors as per the present disclosure are genetically engineered T cell receptors (TCRs) and components thereof, as well as functional non-TCR antigen receptors, such as chimeric antigen receptors (CAR) as previously described.

[0314] Methods by which immune cells can be genetically modified to express a recombinant antigen receptor are well known in the art. A nucleic acid molecule encoding the antigen receptor may be introduced into the cell in the form of e.g. a vector, or any other suitable nucleic acid construct. Vectors, and their required components, are well known in the art. Nucleic acid molecules encoding antigen receptors can be generated using any method known in the art, e.g. molecular cloning using PCR. Antigen receptor sequences can be modified using commonly-used methods, such as site-directed mutagenesis.

[0315] The present disclosure also relates to a method for providing a T cell population which targets a tumor neoantigenic peptide as herein disclosed.

[0316] The T cell population may comprise CD8+ T cells, CD4+ T cells or CD8+ and CD4+ T cells.

[0317] T cell populations produced in accordance with the present disclosure may be enriched with T cells that are specific to, i.e. target, the tumor neoantigenic peptide of the present disclosure. That is, the T cell population that is produced in accordance with the present disclosure will have an increased number of T cells that target one or more tumor neoantigenic peptide. For example, the T cell population of the disclosure will have an increased number of T cells that target a tumor neoantigenic peptide compared with the T cells in the sample isolated from the subject. That is to say, the composition of the T cell population will differ from that of a “native” T cell population (i.e. a population that has not undergone the identification and expansion steps discussed herein), in that the percentage or proportion of T cells that target a tumor neoantigenic peptide will be increased.

[0318] T cell populations produced in accordance with the present disclosure may be enriched with T cells that are specific to, i.e. target, tumor neoantigenic peptide. That is, the T cell population that is produced in accordance with the present disclosure will have an increased number of T cells that target one or more tumor neoantigenic peptide of the present disclosure. For example, the T cell population of the present disclosure will have an increased number of T cells that target a tumor neoantigenic peptide compared with the T cells in the sample isolated from the subject. That is to say, the composition of the T cell population will differ from that of a “native” T cell population (i.e. a population that has not undergone the identification and expansion steps discussed herein), in that the percentage or proportion of T cells that target a tumor neoantigenic peptide will be increased.

[0319] The T cell population according to the present disclosure may have at least about 0.2, 0.3, 0.4, 0.5, 0.6, 0.7, 0.8, 0.9, 1, 2, 3, 4, 5, 6, 7, 8, 9, 10, 1 1, 12, 13, 14, 15, 16, 17, 18, 19, 20, 25, 30, 35, 40, 45, 50, 55, 60, 65, 70, 75, 80, 85, 90, 95 or 100% T cells that target a tumor neoantigenic peptide as herein disclosed. For example, the T cell population may have about 0.2%-5%, 5%-10%, 10-20%, 20-30%, 30-40%, 40-50%, 50-70% or 70-100% T cells that target a tumor neoantigenic peptide of the present disclosure.

[0320] An expanded population of tumor neoantigenic peptide-reactive T cells may have a higher activity than a population of T cells not expanded, for example, using a tumor neoantigenic peptide. Reference to “activity” may represent the response of the T cell population to restimulation with a tumor neoantigenic peptide, e.g. a peptide corresponding to the peptide used for expansion, or a mix of tumor neoantigenic peptide. Suitable methods for assaying the response are known in the art. For example, cytokine production may be measured (e.g. IL2 or IFNy production may be measured). The reference to a “higher activity” includes, for example, a 1-5, 5-10, 10-20, 20-50, 50-100, 100-500, 500-1000-fold increase in activity. In one aspect the activity may be more than 1000-fold higher.

[0321] In a preferred embodiment present disclosure provides a plurality or population, i.e. more than one, of T cells wherein the plurality of T cells comprises a T cell which recognizes a clonal tumor neoantigenic peptide and a T cell which recognizes a different clonal tumor neoantigenic peptide. As such, the present disclosure provides a plurality of T cells which recognize different clonal tumor neoantigenic peptide. Different T cells in the plurality or population may alternatively have different TCRs which recognize the same tumor neoantigenic peptide.

[0322] In a preferred embodiment the number of clonal tumor neoantigenic peptide recognized by the plurality of T cells is from 2 to 1000. For example, the number of clonal neo-antigens recognized may be 2, 3, 4, 5, 6, 7, 8, 9, 10, 20, 50, 100, 150, 200, 250, 300, 350, 400, 450, 500, 550, 600, 650, 700, 750, 800, 850, 900, 950 or 1000, preferably 2 to 100. There may be a plurality of T cells with different TCRs but which recognize the same clonal neo-antigen.

[0323] The T cell population may be all or primarily composed of CD8+ T cells, or all or primarily composed of a mixture of CD8+ T cells and CD4+ T cells or all or primarily composed of CD4+ T cells.

[0324] In particular embodiments, the T cell population is generated from T cells isolated from a subject with a tumor. For example, the T cell population may be generated from T cells in a sample isolated from a subject with a tumor. The sample may be a tumor sample, a peripheral blood sample or a sample from other tissues of the subject.

[0325] In a particular embodiment the T cell population is generated from a sample from the tumor in which the tumor neoantigenic peptide is identified. In other words, the T cell population is isolated from a sample derived from the tumor of a patient to be treated. Such T cells are referred to herein as ‘tumor infiltrating lymphocytes’ (TILs).

[0326] T cells may be isolated using methods which are well known in the art. For example, T cells may be purified from single cell suspensions generated from samples on the basis of expression of CD3, CD4 or CD8. T cells may be enriched from samples by passage through a Ficoll-paque gradient.

[0327] Cancer Therapeutic and Diagnostic Methods

[0328] In any of the embodiments, the Cancer Therapeutic Products described herein may be used in methods for inhibiting proliferation of cancer cells. The Cancer Therapeutic Products described herein may also be used in the treatment of cancer or tumor, typically a cancer driven (or associated with) by a transcription factor fusion as notably listed in table 1 in patients suffering from such cancer or tumor, or for the prophylactic treatment of such cancer, in patients at risk of such cancer or tumor.

[0329] Cancers that can be treated using the therapy described herein include any solid or non-solid tumors, typically the tumors are driven (or associated with) by a transcription factor fusion as notably listed in table 1, typically the tumor is a mesenchymatous tumor, or a sarcoma, as listed in table 1. In a specific embodiment of the present disclosure, the cancer is Ewing sarcoma.

[0330] Cancers includes also the cancers which are refractory to treatment with other chemotherapeutics. The term “refractory”, as used herein refers to a cancer (and/or metastases thereof), which shows no or only weak antiproliferative response (e.g., no or only weak inhibition of tumor growth) after treatment with another chemotherapeutic agent. These are cancers that cannot be treated satisfactorily with other chemotherapeutics. Refractory cancers encompass not only (i) cancers where one or more chemotherapeutics have already failed during treatment of a patient, but also (ii) cancers that can be shown to be refractory by other means, e.g., biopsy and culture in the presence of chemotherapeutics.

[0331] The therapy described herein is also applicable to the treatment of patients in need thereof who have not been previously treated.

[0332] A subject as per the present disclosure is typically a patient in need thereof that has been diagnosed with tumor, typically a tumor driven (or associated with) by a transcription factor fusion as notably listed in table 1, notably Ewing sarcoma or is at risk of developing tumor, notably Ewing sarcoma. The subject is typically a mammal, notably a human, dog, cat, horse or any animal in which a tumor specific immune response is desired.

[0333] The present disclosure also pertains to a neoantigenic peptide, a population of APCs, a vaccine or immunogenic composition, a polynucleotide encoding a neoantigenic peptide or a vector as previously defined for use in cancer vaccination therapy of a subject or for treating cancer in a subject, typically a tumor driven (or associated with) by a transcription factor fusion as notably listed in table 1, notably for treating Ewing sarcoma, wherein the peptide(s) binds at least one MHC molecule of said subject.

[0334] The present disclosure also provides a method for treating cancer, typically a tumor driven (or associated with) by a transcription factor fusion as notably listed in table 1, notably Ewing sarcoma, in a subject comprising administering a vaccine or immunogenic composition as described herein to said subject in a therapeutically effective amount to treat the subject. The method may additionally comprise the step of identifying a subject who has a cancer or a tumor, notably who is suffering from Ewing sarcoma.

[0335] The present disclosure also relates to a method of treating cancer, typically a tumor driven (or associated with) by a transcription factor fusion as notably listed in table 1, notably Ewing sarcoma, comprising producing an antibody or antigen-binding fragment thereof by the method as herein described and administering to a subject with cancer, or tumor said antibody or antigen-binding fragment thereof, or with an immune cell expressing said antibody or antigen-binding fragment thereof, in a therapeutically effective amount to treat said subject.

[0336] The present disclosure also relates to an antibody (including variants and derivatives thereof), a T cell receptor (TCR) (including variants and derivatives thereof), or a CAR (including variants and derivatives thereof) which are directed against a tumor neoantigenic peptide as herein described, optionally in association with an MEW or HLA molecule, for use in cancer therapy of a subject, notably Ewing sarcoma therapy, wherein the tumor neoantigenic peptide binds at least one MHC molecule of said subject.

[0337] The present disclosure also relates to an antibody (including variants and derivatives thereof), a T cell receptor (TCR) (including variants and derivatives thereof), or a CAR (including variants and derivatives thereof) which are directed against a tumor neoantigenic peptide as herein described, optionally in association with an MEW or HLA molecule, or an immune cell which targets a neoantigenic peptide, as previously defined, for use in adoptive cell or CAR-T cell therapy in a subject, wherein the tumor neoantigenic peptide binds at least one MEW molecule of said subject.

[0338] Typically, the skilled person is able to select an appropriate antigen receptor which binds and recognizes a tumor neoantigenic peptide as previously defined with which to redirect an immune cell to be used for use in cancer cell therapy, notably Ewing sarcoma cell therapy. In a particular embodiment, the immune cell for use in the method of the present disclosure is a redirected T-cell, e.g. a redirected CD8+ and/or CD4+ T-cell.

[0339] The inventors herein provide demonstration that peptides which expression is positively regulated by EWS-FLI1 can be recognized by naïve T-cells from controls. This discovery has strong potentials in diagnostic. Indeed, it provides tumor-specific biomarkers that can discriminate Ewing sarcoma from other tumors, particularly from other sarcomas.

[0340] The present disclosure therefore also encompasses a method for the diagnostic of a tumor associated with transcription factor fusion in a patient. Said method comprises the identification, as per the method as herein disclosed, in a tumor sample obtained from said patient of one or more unannotated transcripts which transcription is positively regulated by said transcription factor fusion or negatively regulated upon depletion of said transcription factor fusion. As previously defined an transcription factor fusion is typically a fusion transcription factor having gain-of-function activities. Typically, said one or more transcripts have no match on the representative transcriptome.

[0341] More specifically, the present disclosure provides a method for the diagnostic of Ewing sarcoma tumor in a patient, notably for discriminating Ewing sarcoma from other sarcomas. Said method comprises a step of identifying, in an Ewing sarcoma tumor sample obtained from a patient one or more unannotated transcript which transcription is positively regulated by EWS-FLI1, or negatively regulated upon EW-FLI1 depletion. Typically, said one or more transcripts have no match on the representative transcriptome. Detection and identification of transcript can be achieved as described in the present application. Typically also a neoantigenic peptide encoded by a part of an (ORF) sequence from such an unannotated trancript is expressed at a higher level or frequency in an Ewing sarcoma sample compared to normal tissue sample. Typically also, such neoantigenic peptide can be recognized by naïve T-cells from said patient.

[0342] The present application also encompasses a method for treating a patient suffering from a tumor associated with transcription factor fusion (also named herein transcription factor fusion) in a patient as herein disclosed, notably suffering from an Ewing's sarcoma tumor comprising a step of diagnosing said tumor as per the method as above defined and a step of administering an treatment dedicated to the identified tumor.

[0343] In some embodiment, the present application relates to a method for treating a patient suffering from a tumor associated with transcription factor fusion in a patient, notably suffering from an Ewing's sarcoma tumor, comprising (i) a step of diagnosing said tumor as per the method as above defined and (ii) a step of administering any one or a combination of the cancer therapeutic products described herein.

[0344] In some embodiments, cancer treatment, vaccination therapy and/or adoptive cell cancer therapy as above described are administered in combination with additional cancer therapies; In some embodiments, cancer treatment, vaccination therapy and/or adoptive cell cancer therapy as above described are administered in combination with targeted therapy, immunotherapy such as immune checkpoint therapy and immune checkpoint inhibitor, co-stimulatory antibodies, chemotherapy and/or radiotherapy.

[0345] Immune checkpoint therapy such as checkpoint inhibitors include, but are not limited to programmed death-1 (PD-1) inhibitors, programmed death ligand-1 (PD-L1) inhibitors, programmed death ligand-2 (PD-L2) inhibitors, lymphocyte-activation gene 3 (LAG3) inhibitors, T-cell immunoglobulin and mucin-domain containing protein 3 (TIM-3) inhibitors, T cell immunoreceptor with Ig and ITIM domains (TIGIT) inhibitors, B- and T-lymphocyte attenuator (BTLA) inhibitors, V-domain Ig suppressor of T-cell activation (VISTA) inhibitors, cytotoxic T-lymphocyte-associated protein 4 (CTLA4) inhibitors, Indoleamine 2,3-dioxygenase (IDO) inhibitors, killer immunoglobulin-like receptors (KIR) inhibitors, KIR2L3 inhibitors, KIR3DL2 inhibitors and carcinoembryonic antigen-related cell adhesion molecule 1 (CEACAM-1) inhibitors. In particular, checkpoint inhibitors include antibodies anti-PD1, anti-PD-L1, anti-CTLA-4, anti-TIM-3, anti-LAG3. Co-stimulatory antibodies deliver positive signals through immune-regulatory receptors including but not limited to ICOS, CD137, CD27, OX-40 and GITR.

[0346] Example of anti-PD1 antibodies include, but are not limited to, nivolumab, cemiplimab (REGN2810 or REGN-2810), tislelizumab (BGB-A317), tislelizumab, spartalizumab (PDR001 or PDR-001), ABBV-181, JNJ-63723283, BI 754091, MAG012, TSR-042, AGEN2034, pidilizumab, nivolumab (ONO-4538, BMS-936558, MDX1106, GTPL7335 or Opdivo), pembrolizumab (MK-3475, MK03475, lambrolizumab, SCH-900475 or Keytruda) and antibodies described in International patent applications WO2004004771, WO2004056875, WO2006121168, WO2008156712, WO2009014708, WO2009114335, WO2013043569 and WO2014047350.

[0347] Example of anti-PD-L1 antibodies include, but are not limited to, LY3300054, atezolizumab, durvalumab and avelumab.

[0348] Example of anti-CTLA-4 antibodies include, but are not limited to, ipilimumab (see, e.g., US patents U.S. Pat. Nos. 6,984,720 and 8,017,114), tremelimumab (see, e.g., U.S. Pat. Nos. 7,109,003 and 8,143,379), single chain anti-CTLA4 antibodies (see, e.g., International patent applications WO1997020574 and WO2007123737) and antibodies described in U.S. Pat. No. 8,491,895.

[0349] Example of anti-VISTA antibodies are described in US patent application US20130177557.

[0350] Example of inhibitors of the LAG3 receptor are described in U.S. Pat. No. 5,773,578.

[0351] Example of KIR inhibitor is IPH4102 targeting KIR3DL2.

[0352] As used herein, the term “chemotherapy” has its general meaning in the art and refers to the treatment that consists in administering to the patient a chemotherapeutic agent. A chemotherapeutic entity as used herein refers to an entity which is destructive to a cell, that is the entity reduces the viability of the cell. The chemotherapeutic entity may be a cytotoxic drug. Chemotherapeutic agents include, but are not limited to alkylating agents such as thiotepa and cyclosphosphamide; alkyl sulfonates such as busulfan, improsulfan and piposulfan; aziridines such as benzodopa, carboquone, meturedopa, and uredopa; ethylenimines and methylamelamines including altretamine, triethylenemelamine, trietylenephosphoramide, triethiylenethiophosphoramide and trimethylolomelamine; acetogenins (especially bullatacin and bullatacinone); a camptothecin (including the synthetic analogue topotecan); bryostatin; callystatin; CC-1065 (including its adozelesin, carzelesin and bizelesin synthetic analogues); cryptophycins (particularly cryptophycin 1 and cryptophycin 8); dolastatin; duocarmycin (including the synthetic analogues, KW-2189 and CB1-TM1); eleutherobin; pancratistatin; a sarcodictyin; spongistatin; nitrogen mustards such as chlorambucil, chlornaphazine, cholophosphamide, estramustine, ifosfamide, mechlorethamine, mechlorethamine oxide hydrochloride, melphalan, novembichin, phenesterine, prednimustine, trofosfamide, uracil mustard; nitrosureas such as carmustine, chlorozotocin, fotemustine, lomustine, nimustine, and ranimnustine; antibiotics such as the enediyne antibiotics (e.g., calicheamicin, especially calicheamicin gammall and calicheamicin omegall; dynemicin, including dynemicin A; bisphosphonates, such as clodronate; an esperamicin; as well as neocarzinostatin chromophore and related chromoprotein enediyne antiobiotic chromophores, aclacinomysins, actinomycin, authrarnycin, azaserine, bleomycins, cactinomycin, carabicin, caminomycin, carzinophilin, chromomycinis, dactinomycin, daunorubicin, detorubicin, 6-diazo-5-oxo-L-norleucine, doxorubicin (including morpholino-doxorubicin, cyanomorpholino-doxorubicin, 2-pyrrolino-doxorubicin and deoxy doxorubicin), epirubicin, esorubicin, idarubicin, marcellomycin, mitomycins such as mitomycin C, mycophenolic acid, nogalamycin, olivomycins, peplomycin, potfiromycin, puromycin, quelamycin, rodorubicin, streptonigrin, streptozocin, tubercidin, ubenimex, zinostatin, zorubicin; anti-metabolites such as methotrexate and 5-fluorouracil (5-FU); folic acid analogues such as denopterin, methotrexate, pteropterin, trimetrexate; purine analogs such as fludarabine, 6-mercaptopurine, thiamiprine, thioguanine; pyrimidine analogs such as ancitabine, azacitidine, 6-azauridine, carmofur, cytarabine, dideoxyuridine, doxifluridine, enocitabine, floxuridine; androgens such as calusterone, dromostanolone propionate, epitiostanol, mepitiostane, testolactone; anti-adrenals such as aminoglutethimide, mitotane, trilostane; folic acid replenisher such as frolinic acid; aceglatone; aldophosphamide glycoside; aminolevulinic acid; eniluracil; amsacrine; bestrabucil; bisantrene; edatraxate; defofamine; demecolcine; diaziquone; elformithine; elliptinium acetate; an epothilone; etoglucid; gallium nitrate; hydroxyurea; lentinan; lonidainine; maytansinoids such as maytansine and ansamitocins; mitoguazone; mitoxantrone; mopidanmol; nitraerine; pentostatin; phenamet; pirarubicin; losoxantrone; podophyllinic acid; 2-ethylhydrazide; methylhydrazine derivatives including N-methylhydrazine (MIH) and procarbazine; PSK polysaccharide complex); razoxane; rhizoxin; sizofuran; spirogermanium; tenuazonic acid; triaziquone; 2,2′,2″-trichlorotriethylamine; trichothecenes (especially T-2 toxin, verracurin A, roridin A and anguidine); urethan; vindesine; dacarbazine; mannomustine; mitobronitol; mitolactol; pipobroman; gacytosine; arabinoside (“Ara-C”); cyclophosphamide; thiotepa; taxoids, e.g., paclitaxel and doxetaxel; chlorambucil; gemcitabine; 6-thioguanine; mercaptopurine; methotrexate; platinum coordination complexes such as cisplatin, oxaliplatin and carboplatin; vinblastine; platinum; etoposide (VP-16); ifosfamide; mitoxantrone; vincristine; vinorelbine; novantrone; teniposide; edatrexate; daunomycin; aminopterin; xeloda; ibandronate; irinotecan (e.g., CPT-1 1); topoisomerase inhibitor RFS 2000; difluoromethylomithine (DMFO); retinoids such as retinoic acid; capecitabine; anthracyclines, nitrosoureas, antimetabolites, epipodophylotoxins, enzymes such as L-asparaginase; anthracenediones; hormones and antagonists including adrenocorticosteroid antagonists such as prednisone and equivalents, dexamethasone and aminoglutethimide; progestin such as hydroxyprogesterone caproate, medroxyprogesterone acetate and megestrol acetate; estrogen such as diethylstilbestrol and ethinyl estradiol equivalents; antiestrogen such as tamoxifen; androgens including testosterone propionate and fluoxymesterone/equivalents; antiandrogens such as flutamide, gonadotropin-releasing hormone analogs and leuprolide; and non-steroidal antiandrogens such as flutamide; biological response modifiers such as IFNa, IL-2, G-CSF and GM-CSF; and pharmaceutically acceptable salts, acids or derivatives of any of the above.

[0353] Suitable examples of radiation therapies include, but are not limited to external beam radiotherapy (such as superficial X-rays therapy, orthovoltage X-rays therapy, megavoltage X-rays therapy, radiosurgery, stereotactic radiation therapy, Fractionated stereotactic radiation therapy, cobalt therapy, electron therapy, fast neutron therapy, neutron-capture therapy, proton therapy, intensity modulated radiation therapy (IMRT), 3-dimensional conformal radiation therapy (3D-CRT) and the like); brachytherapy; unsealed source radiotherapy; tomotherapy; and the like. Gamma rays are another form of photons used in radiotherapy. Gamma rays are produced spontaneously as certain elements (such as radium, uranium, and cobalt 60) release radiation as they decompose, or decay. In some embodiments, radiotherapy may be proton radiotherapy or proton minibeam radiation therapy. Proton radiotherapy is an ultra-precise form of radiotherapy that uses proton beams (Prezado Y, Jouvion G, Guardiola C, Gonzalez W, Juchaux M, Bergs J, Nauraye C, Labiod D, De Marzi L, Pouzoulet F, Patriarca A, Dendale R. Tumor Control in RG2 Glioma-Bearing Rats: A Comparison Between Proton Minibeam Therapy and Standard Proton Therapy. Int J Radiat Oncol Biol Phys. 2019 Jun. 1; 104(2):266-271. doi: 10.1016/j.ijrobp.2019.01.080; Prezado Y, Jouvion G, Patriarca A, Nauraye C, Guardiola C, Juchaux M, Lamirault C, Labiod D, Jourdain L, Sebrie C, Dendale R, Gonzalez W, Pouzoulet F. Proton minibeam radiation therapy widens the therapeutic index for high-grade gliomas. Sci Rep. 2018 Nov. 7; 8(1):16479. doi: 10.1038/s41598-018-34796-8). Radiotherapy may also be FLASH radiotherapy (FLASH-RT) or FLASH proton irradiation. FLASH radiotherapy involves the ultra-fast delivery of radiation treatment at dose rates several orders of magnitude greater than those currently in routine clinical practice (ultra-high dose rate) (Favaudon V, Fouillade C, Vozenin M C. The radiotherapy FLASH to save healthy tissues. Med Sci (Paris) 2015; 31: 121-123. DOI: 10.1051/medsci/20153102002); Patriarca A., Fouillade C. M., Martin F., Pouzoulet F., Nauraye C., et al. Experimental set-up for FLASH proton irradiation of small animals using a clinical system. Int J Radiat Oncol Biol Phys, 102 (2018), pp. 619-626. doi: 10.1016/j.ijrobp.2018.06.403. Epub 2018 Jul. 11).

[0354] “In combination” may refer to administration of the additional therapy before, at the same time as or after administration of the T cell composition according to the present disclosure.

[0355] In addition or as an alternative to the combination with checkpoint blockade, the T cell composition of the present disclosure may also be genetically modified to render them resistant to immune-checkpoints using gene-editing technologies including but not limited to TALEN and Crispr/Cas. Such methods are known in the art, see e.g. US20140120622. Gene editing technologies may be used to prevent the expression of immune checkpoints expressed by T cells (see the above listed checkpoint inhibitors) and more particularly but not limited to PD-1, Lag-3, Tim-3, TIGIT, BTLA CTLA-4 and combinations of these. The T cell as discussed here may be modified by any of these methods.

[0356] The T cell according to the present disclosure may also be genetically modified to express molecules increasing homing into tumors and or to deliver inflammatory mediators into the tumor microenvironment, including but not limited to cytokines, soluble immune-regulatory receptors and/or ligands.

[0357] In a particular embodiment, said tumor neoantigenic peptide is used in cancer vaccination therapy in combination with another immunotherapy such as immune checkpoint therapy, more particularly in combination with anti-checkpoint antibodies such as the above exemplified antibodies and notably but not limited to the anti-PD1, anti-PDL1, anti-CTLA-4, anti-TIM-3, anti-LAG3, anti-GITR antibodies.

TABLE 3
description of neotranscripts of the present disclosure

JUJE1|chr1: 73, 171, 787-73, 178, 490|exon1a-2-3
JUJE1|chr1: 73, 171, 787-73, 178, 490|exon1b-2-3
JUJE2|chr2: 4633219-4637217|exon1-2-3
JUJE3|chr3: 197839238-197842858|exon1-2-3
JUJE10|chr10: 19203764-19206511|exon 1-2-3-4
JUJE10|chr10: 19203764-19206511|exon 1-2-3-5
JUJE10|chr10: 19203764-19206511|exon 1-3-4
JUJE10|chr10: 19203764-19206511|exon 1-3-5

TABLE 4
Description of the sequences

| SEQ ID NO: | Sequence type/name |
|---|---|
| 1-145 | EWS neotranscripts |
| 146 | JUJE1\|chr1: 73, 171, 787-73, 178, 490\|exon1a-2-3 |
| 147 | JUJE1\|chr1: 73, 171, 787-73, 178, 490\|exon1b-2-3 |
| 148 | JUJE2\|chr2: 4633219-4637217\|exon1-2-3 |
| 149 | JUJE3\|chr3: 197839238-197842858\|exon1-2-3 |
| 150 | JUJE10\|chr10: 19203764-19206511\|exon 1-2-3-4 |
| 151 | JUJE10\|chr10: 19203764-19206511\|exon 1-2-3-5 |
| 152 | JUJE10\|chr10: 19203764-19206511\|exon 1-3-4 |
| 153 | JUJE10\|chr10: 19203764-19206511\|exon 1-3-5 |
| 154 | EWS-FLI1 primers F |
| 155 | EWS-FLI1 primers R |
| 156 | RPLP0 primer F |
| 157 | RPLP0 primer R |
| 158 | JUJE1 primer F |
| 159 | JUJE1 primer R |
| 160 | JUJE2 primer F |
| 161 | JUJER primer |
| 162 | JUJE3 primer F |
| 163 | JUJE3 primer R |
| 164 | JUJE10 primer F |
| 165 | JUJE 10 primer R |
| 166-201 | neopeptides |

TABLE 5
neogenes classifications

| | Cell_line | ChIP-seq | Type |
|---|---|---|---|
| Ewing_neogene | | | |
| Ew_NG1 | 1 | 1 | 2 |
| Ew_NG2 | 1 | 1 | 2 |
| Ew_NG3 | 1 | 1 | 2 |
| Ew_NG4 | 1 | 1 | 2 |
| Ew_NG5 | 1 | 0 | 1 |
| Ew_NG6 | 1 | 0 | 1 |
| Ew_NG7 | 1 | 0 | 1 |
| Ew_NG8 | 1 | 1 | 2 |
| Ew_NG9 | 0 | 0 | 0 |
| Ew_NG10 | 1 | 1 | 2 |
| Ew_NG11 | 0 | 0 | 0 |
| Ew_NG12 | 1 | 1 | 2 |
| Ew_NG13 | 1 | 1 | 2 |
| Ew_NG14 | NA | 0 | 0 |
| Ew_NG15 | NA | 0 | 0 |
| Ew_NG16 | 1 | 0 | 1 |
| Ew_NG17 | 0 | 0 | 0 |
| Ew_NG18 | 1 | 0 | 1 |
| Ew_NG19 | 0 | 0 | 0 |
| Ew_NG20 | 1 | 0 | 1 |
| Ew_NG21 | 1 | 1 | 2 |
| Ew_NG22 | 1 | 1 | 2 |
| Ew_NG23 | 1 | 0 | 1 |
| Ew_NG24 | 1 | 1 | 2 |
| Ew_NG25 | 1 | 1 | 2 |
| aRMS_neogene | | | |
| aRMS_NG1 | NA | 0 | 0 |
| aRMS_NG2 | 0 | 0 | 0 |
| aRMS_NG3 | 0 | 0 | 0 |
| aRMS_NG4 | 0 | 0 | 0 |
| aRMS_NG5 | 0 | 1 | 1 |
| aRMS_NG6 | 0 | 1 | 1 |
| aRMS_NG7 | 0 | 1 | 1 |
| aRMS_NG8 | 0 | 1 | 1 |
| aRMS_NG9 | 0 | 0 | 0 |
| aRMS_NG10 | 0 | 1 | 1 |
| aRMS_NG11 | 0 | 0 | 0 |
| aRMS_NG12 | 0 | 0 | 0 |
| aRMS_NG13 | NA | 1 | 1 |
| aRMS_NG14 | 0 | 0 | 0 |
| aRMS_NG15 | NA | 0 | 0 |
| aRMS_NG16 | 1 | 0 | 1 |
| aRMS_NG17 | 1 | 1 | 2 |
| aRMS_NG18 | 0 | 1 | 1 |
| aRMS_NG19 | NA | 0 | 0 |
| aRMS_NG20 | NA | 0 | 0 |
| aRMS_NG21 | NA | 0 | 0 |
| aRMS_NG22 | 1 | 0 | 1 |
| aRMS_NG23 | 1 | 1 | 2 |
| aRMS_NG24 | NA | 0 | 0 |
| aRMS_NG25 | NA | 0 | 0 |
| aRMS_NG26 | 0 | 0 | 0 |
| aRMS_NG27 | 0 | 0 | 0 |
| aRMS_NG28 | 0 | 1 | 1 |
| aRMS_NG29 | 1 | 1 | 2 |
| aRMS_NG30 | 1 | 0 | 1 |
| aRMS_NG31 | 0 | 1 | 1 |
| aRMS_NG32 | 0 | 0 | 0 |
| aRMS_NG33 | 0 | 1 | 0 |
| aRMS_NG34 | 0 | 0 | 0 |
| aRMS_NG35 | 1 | 0 | 1 |
| aRMS_NG36 | NA | 0 | 0 |
| DSRCT_neogene | | | |
| DSRCT_NG1 | 1 | 1 | 2 |
| DSRCT_NG2 | 0 | 0 | 0 |
| DSRCT_NG3 | 0 | 1 | 0 |
| DSRCT_NG4 | 1 | 1 | 2 |
| DSRCT_NG5 | 1 | 1 | 2 |
| DSRCT_NG6 | 0 | 1 | 1 |
| DSRCT_NG7 | 0 | 1 | 1 |
| DSRCT_NG8 | 0 | 1 | 1 |
| DSRCT_NG9 | 1 | 0 | 1 |
| DSRCT_NG10 | 1 | 1 | 2 |
| DSRCT_NG11 | 1 | 1 | 2 |
| DSRCT_NG12 | 0 | 0 | 0 |
| DSRCT_NG13 | 1 | 1 | 2 |
| DSRCT_NG14 | 1 | 1 | 2 |
| DSRCT_NG15 | NA | 0 | 0 |
| DSRCT_NG16 | 1 | 1 | 2 |
| DSRCT_NG17 | 0 | 1 | 1 |
| DSRCT_NG18 | 1 | 1 | 2 |
| DSRCT_NG19 | 1 | 0 | 1 |
| DSRCT_NG20 | 1 | 1 | 2 |
| DSRCT_NG21 | 1 | 1 | 2 |
| DSRCT_NG22 | 0 | 0 | 0 |
| DSRCT_NG23 | 1 | 0 | 1 |
| DSRCT_NG24 | 1 | 1 | 2 |
| DSRCT_NG25 | 1 | 1 | 2 |
| DSRCT_NG26 | 0 | 1 | 1 |
| DSRCT_NG27 | 0 | 0 | 0 |
| DSRCT_NG28 | 1 | 1 | 2 |
| DSRCT_NG29 | 1 | 1 | 2 |
| DSRCT_NG30 | 0 | 1 | 1 |
| DSRCT_NG31 | 1 | 1 | 2 |
| DSRCT_NG32 | 0 | 1 | 1 |
| DSRCT_NG33 | 0 | 1 | 1 |
| DSRCT_NG34 | 0 | 0 | 0 |
| DSRCT_NG35 | 0 | 0 | 0 |
| DSRCT_NG36 | 1 | 0 | 1 |
| DSRCT_NG37 | 1 | 0 | 1 |

TABLE 6
numbers of neogenes/neotranscripts identified by
transcription factor fusion-driven tumor type

| | Fusion gene (most | Number of | Number of | Number | Number of |
|---|---|---|---|---|---|
| Diagnosis | commmon if several) | neogenes | neotranscripts | of ORFs | strong binders |
| AFH | EWSR1-ATF1/CREB1 | 20 | 28 | 1917 | 1536 |
| aRMS | PAX3/7-FOXO1 | 36 | 72 | 6743 | 6105 |
| ASPS | ASPSCR1-TFE3 | 33 | 103 | 3841 | 3281 |
| BCOR | BCOR-CCNB3 | 6 | 6 | 160 | 78 |
| CCS | EWSR1-ATF1/CREB1 | 15 | 24 | 1956 | 2543 |
| CIC | CIC-DUX4 | 8 | 16 | 1639 | 1312 |
| DSRCT | EWSR1-WT1 | 37 | 105 | 8558 | 6850 |
| emCS | EWSR1-NR4A3 | 2 | 2 | 71 | 72 |
| Ew | EWSR1-FLI1 | 25 | 61 | 4839 | 4355 |
| LGFS | FUS-CREB3L2 | 44 | 70 | 3443 | 2657 |
| MCS | HEY-NCOA2 | 11 | 21 | 733 | 527 |
| Midline | BRD-NUT | 29 | 64 | 4300 | 3566 |
| mLPS | FUS-DDIT3 | 9 | 14 | 832 | 652 |
| NFAT | EWSR1-NFATC2 | 47 | 88 | 4510 | 3769 |
| PATZ1 | EWSR1-PATZ1 | 22 | 30 | 997 | 720 |
| SFT | NAB2-STAT6 | 35 | 54 | 2962 | 2511 |
| SS | SS18-SSX | 3 | 16 | 1157 | 1106 |
| TFE3 | ASPSCR1-TFE3 | 15 | 32 | 1987 | 1643 |
| TMFI | ALK fusions | 8 | 13 | 1100 | 1006 |

TABLE 7
peptides and Net MHCpan values: SB: Strong Binder; WB: Weak Binder;
Score EL: The raw prediction score. %Rank_EL: Rank of the predicted binding score
compared to a set of random natural peptides. This measure is not affected by inherent
bias of certain molecules towards higher or lower mean predicted affinities. Strong
binders are defined as having %rank <0.5, and weak binders with %rank <2. In grey,
tested SB peptides.

| ID | MHC | Peptide | Score_EL | %Rank_EL | BindLevel |
|---|---|---|---|---|---|
| Chr2_lcl_ORF2 | HLA-A*02:01 | VLYPGYYSL | 0.9689120 | 0.014 | SB |
| Chr2_lcl_ORF2 | HLA-A*02:01 | LQLAISSAV | 0.1288180 | 1.566 | WB |
| Chr10_lcl_ORF19 | HLA-A*02:01 | FLSQELLPA | 0.6954240 | 0.186 | SB |
| Chr10_lcl_ORF25 | HLA-A*02:01 | YISRWSLPI | 0.0531370 | 2.832 | |
| Chr10_lcl_ORF13 | HLA-A*02:01 | SLCFCNHML | 0.1462430 | 1.450 | WB |
| Chr10_lcl_ORF13 | HLA-A*02:01 | FCNHMLVYI | 0.0221690 | 4.520 | |
| Chr10_lcl_ORF22 | HLA-A*02:01 | KLAESLWIA | 0.8668710 | 0.066 | SB |
| Chr10_lcl_ORF22 | HLA-A*02:01 | SLWIAILHL | 0.7126450 | 0.170 | SB |
| Chr10_lcl_ORF22 | HLA-A*02:01 | LWIAILHLV | 0.0080400 | 4.014 | |
| Chr10_lcl_ORF17 | HLA-A*02:01 | YVWHKHQKV | 0.7674120 | 0.130 | SB |
| Chr10_lcl_ORF17 | HLA-A*02:01 | RLKNVLLHI | 0.4692910 | 0.433 | SB |
| Chr10_lcl_ORF13 | HLA-A*02:01 | AIIAFMTSL | 0.4662990 | 0.437 | SB |
| Chr10_lcl_ORF21 | HLA-A*02:01 | RLYDQSVFL | 0.9858280 | 0.006 | SB |
| Chr10_lcl_ORF23 | HLA-A*02:01 | YMLAYFRGL | 0.3824480 | 0.564 | WB |
| Chr10_lcl_ORF14 | HLA-A*02:01 | KLAFENVFA | 0.7895910 | 0.114 | SB |
| ChrlexA_lcl_ORF | HLA-A*02:01 | MQFSLFVFV | 0.4407340 | 0.472 | SB |
| ChrlexA_lcl_ORF | HLA-A*02:01 | ALVCLIYLI | 0.0999940 | 1.887 | WB |
| ChrlexB_lcl_ORF | HLA-A*02:01 | MQFSLFVFV | 0.4407340 | 0.472 | SB |
| ChrlexB_lcl_ORF | HLA-A*02:01 | IITDSSTTV | 0.4765820 | 0.423 | SB |
| ChrlexB_lcl_ORF | HLA-A*02:01 | ALVCLIYLI | 0.0999940 | 1.887 | WB |
| CHR3_lcl_ORF4 | HLA-A*02:01 | SMIPHRYKL | 0.6821530 | 0.202 | SB |
| CHR3_lcl_ORF6 | HLA-A*02:01 | YLSRPSPGV | 0.8840530 | 0.057 | SB |
| CHR3_lcl_ORF8 | HLA-A*02:01 | ILSYFHMEL | 0.5895040 | 0.291 | SB |
| CHR3_lcl_ORF7 | HLA-A*02:01 | KLNPIVSYT | 0.5575100 | 0.326 | SB |
| CHR3_lcl_ORF4 | HLA-A*02:01 | FLCHPNPDL | 0.5040700 | 0.388 | SB |
| CHR3_lcl_ORF1 | HLA-A*02:01 | YLHCSSIQC | 0.0684900 | 2.430 | |
| CHR3_lcl_ORF8 | HLA-A*02:01 | YLYFCVILT | 0.0492490 | 2.944 | |
| CHR3_lcl_ORF7 | HLA-A*02:01 | QLIVLYCRI | 0.0099370 | 6.762 | |
| CHR3_lcl_ORF3 | HLA-A*02:01 | VLLVQTEFC | 0.0222770 | 4.508 | |
| CHR3_lcl_ORF2 | HLA-A*02:01 | GLSQPHCLV | 0.2341620 | 0.987 | WB |
| CHR3_lcl_ORF11 | HLA-A*02:01 | KLFCKRPML | 0.4024460 | 0.530 | WB |
| Chr2_lcl_ORF2 | HLA-A*02:01 | FLHHGMERV | 0.9328920 | 0.030 | SB |
| ChrlexA_lcl_ORF4 | HLA-A*02:01 | LLGELAHMV | 0.8720010 | 0.063 | SB |
| CHR3_lcl_ORF12 | HLA-A*02:01 | FLFFFFFCI | 0.0932250 | 1.978 | WB |
| CHR3_lcl_ORf4 | HLA-A*02:01 | VLLSYGISV | 0.8889580 | 0.055 | SB |
| CHR3_lcl_ORF8 | HLA-A*02:01 | RMTYLYFCV | 0.0569350 | 2.724 | |

TABLE 8
Synthetized and tested peptide sequences

| | Numéro | | | | |
|---|---|---|---|---|---|
| MHC | peptide | Peptide | Score_EL | %Rank_EL | BindLevel |
| HLA-A*02:01 | Chr1_A2 | LLGELAHMV | 0.8720010 | 0.063 | SB |
| HLA-A*02:01 | Chr3_A2_1 | VLLSYGISV | 0.8889580 | 0.055 | SB |
| HLA-A*02:01 | Chr3_A2_2 | FLCHPNPDL | 0.5040700 | 0.388 | SB |
| HLA-A*02:01 | Chr3_A2_3 | SMIPHRYKL | 0.6821530 | 0.202 | SB |
| HLA-A*02:01 | Chr3_A2_4 | YLSRPSPGV | 0.8840530 | 0.057 | SB |
| HLA-A*02:01 | Chr3_A2_5 | ILSYFHMEL | 0.5895040 | 0.291 | SB |
| HLA-A*02:01 | Chr3_A2_6 | KLNPIVSYT | 0.5575100 | 0.326 | SB |
| HLA-A*02:01 | Chr10_A2_1 | FLSQELLPA | 0.6954240 | 0.186 | SB |
| HLA-A*02:01 | Chr10_A2_2 | AIIAFMTSL | 0.4662990 | 0.437 | SB |
| HLA-A*02:01 | Chr10_A2_3 | KLAESLWIA | 0.8668710 | 0.066 | SB |
| HLA-A*02:01 | Chr10_A2_4 | SLWIAILHL | 0.7126450 | 0.170 | SB |
| HLA-A*02:01 | ChrlO_A2_5 | RLYDQSVFL | 0.9858280 | 0.006 | SB |
| HLA-A*02:01 | Chr10_A2_6 | YMLAYFRGL | 0.3824480 | 0.564 | WB |
| HLA-A*02:01 | Chr10_A2_7 | YVWHKHQKV | 0.7674120 | 0.130 | SB |
| HLA-A*02:01 | Chr10_A2_8 | KLAFENVFV | 0.7895910 | 0.114 | SB |

TABLE 9
identified transcripts sequence as per the present disclosure.

| Chromosome | feature | start | end | strand | attributes |
|---|---|---|---|---|---|
| chr1 | transcript | 22870455 | 22885380 | + | gene_id “aRMS_NG1”; transcript_id |
| | | | | | “aRMS_NG1.2”; RPKM “0.7620”; cov |
| | | | | | “10.5076”; |
| chr1 | exon | 22870455 | 22872138 | + | gene_id “aRMS_NG1”; transcript_id |
| | | | | | “aRMS_NG1.2”; exon “1”; |
| chr1 | exon | 22878552 | 22879901 | + | gene_id “aRMS_NG1”; transcript_id |
| | | | | | “aRMS_NG1.2”; exon “2”; |
| chr1 | exon | 22882622 | 22885380 | + | gene_id “aRMS_NG1”; transcript_id |
| | | | | | “aRMS_NG1.2”; exon “3”; |
| chr1 | transcript | 22882093 | 22889845 | + | gene_id “aRMS_NG1”; transcript_id |
| | | | | | “aRMS_NG1.1”; RPKM “1.8775”; cov |
| | | | | | “25.8906”; |
| chr1 | exon | 22882093 | 22889845 | + | gene_id “aRMS_NG1”; transcript_id |
| | | | | | “aRMS_NG1.1”; exon “1”; |
| chr1 | transcript | 178523288 | 178528839 | − | gene_id “aRMS_NG2”; transcript_id |
| | | | | | “aRMS_NG2.1”; RPKM “2.3424”; cov |
| | | | | | “32.3011”; |
| chr1 | exon | 178523288 | 178528839 | − | gene_id “aRMS_NG2”; transcript_id |
| | | | | | “aRMS_NG2.1”; exon “1”; |
| chr1 | transcript | 178523288 | 178531111 | − | gene_id “aRMS_NG2”; transcript_id |
| | | | | | “aRMS_NG2.2”; RPKM “1.2211”; cov |
| | | | | | “16.8393”; |
| chr1 | exon | 178523288 | 178524819 | − | gene_id “aRMS_NG2”; transcript_id |
| | | | | | “aRMS_NG2.2”; exon “1”; |
| chr1 | exon | 178528991 | 178531111 | − | gene_id “aRMS_NG2”; transcript_id |
| | | | | | “aRMS_NG2.2”; exon “2”; |
| chr10 | transcript | 113233117 | 113319297 | + | gene_id “aRMS_NG21”; transcript_id |
| | | | | | “aRMS_NG21.1”; RPKM “2.1273”; cov |
| | | | | | “29.3359”; |
| chr10 | exon | 113233117 | 113239865 | + | gene_id “aRMS_NG21”; transcript_id |
| | | | | | “aRMS_NG21.1”; exon “1”; |
| chr10 | exon | 113241588 | 113241647 | + | gene_id “aRMS_NG21”; transcript_id |
| | | | | | “aRMS_NG21.1”; exon “2”; |
| chr10 | exon | 113315484 | 113319297 | + | gene_id “aRMS_NG21”; transcript_id |
| | | | | | “aRMS_NG21.1”; exon “3”; |
| chr10 | transcript | 113233117 | 113319297 | + | gene_id “aRMS_NG21”; transcript_id |
| | | | | | “aRMS_NG21.2”; RPKM “3.4666”; cov |
| | | | | | “47.8042”; |
| chr10 | exon | 113233117 | 113239865 | + | gene_id “aRMS_NG21”; transcript_id |
| | | | | | “aRMS_NG21.2”; exon “1”; |
| chr10 | exon | 113241588 | 113241647 | + | gene_id “aRMS_NG21”; transcript_id |
| | | | | | “aRMS_NG21.2”; exon “2”; |
| chr10 | exon | 113316935 | 113319297 | + | gene_id “aRMS_NG21”; transcript_id |
| | | | | | “aRMS_NG21.2”; exon “3”; |
| chr10 | transcript | 113233117 | 113319297 | + | gene_id “aRMS_NG21”; transcript_id |
| | | | | | “aRMS_NG21.3”; RPKM “2.5307”; cov |
| | | | | | “34.8990”; |
| chr10 | exon | 113233117 | 113239865 | + | gene_id “aRMS_NG21”; transcript_id |
| | | | | | “aRMS_NG21.3”; exon “1”; |
| chr10 | exon | 113241588 | 113241647 | + | gene_id “aRMS_NG21”; transcript_id |
| | | | | | “aRMS_NG21.3”; exon “2”; |
| chr10 | exon | 113298069 | 113298124 | + | gene_id “aRMS_NG21”; transcript_id |
| | | | | | “aRMS_NG21.3”; exon “3”; |
| chr10 | exon | 113316935 | 113319297 | + | gene_id “aRMS_NG21”; transcript_id |
| | | | | | “aRMS_NG21.3”; exon “4”; |
| chr10 | transcript | 113233117 | 113319297 | + | gene_id “aRMS_NG21”; transcript_id |
| | | | | | “aRMS_NG21.4”; RPKM “1.1643”; cov |
| | | | | | “16.0552”; |
| chr10 | exon | 113233117 | 113239865 | + | gene_id “aRMS_NG21”; transcript_id |
| | | | | | “aRMS_NG21.4”; exon “1”; |
| chr10 | exon | 113241588 | 113241647 | + | gene_id “aRMS_NG21”; transcript_id |
| | | | | | “aRMS_NG21.4”; exon “2”; |
| chr10 | exon | 113298069 | 113298124 | + | gene_id “aRMS_NG21”; transcript_id |
| | | | | | “aRMS_NG21.4”; exon “3”; |
| chr10 | exon | 113315484 | 113319297 | + | gene_id “aRMS_NG21”; transcript_id |
| | | | | | “aRMS_NG21.4”; exon “4”; |
| chr11 | transcript | 13049308 | 13076552 | + | gene_id “aRMS_NG22”; transcript_id |
| | | | | | “aRMS_NG22.1”; RPKM “1.8322”; cov |
| | | | | | “25.2665”; |
| chr11 | exon | 13049308 | 13049463 | + | gene_id “aRMS_NG22”; transcript_id |
| | | | | | “aRMS_NG22.1”; exon “1”; |
| chr11 | exon | 13073165 | 13076552 | + | gene_id “aRMS_NG22”; transcript_id |
| | | | | | “aRMS_NG22.1”; exon “2”; |
| chr11 | transcript | 20183702 | 20222468 | + | gene_id “aRMS_NG23”; transcript_id |
| | | | | | “aRMS_NG23.2”; RPKM “1.7210”; cov |
| | | | | | “23.7326”; |
| chr11 | exon | 20183702 | 20183916 | + | gene_id “aRMS_NG23”; transcript_id |
| | | | | | “aRMS_NG23.2”; exon “1”; |
| chr11 | exon | 20209051 | 20209129 | + | gene_id “aRMS_NG23”; transcript_id |
| | | | | | “aRMS_NG23.2”; exon “2”; |
| chr11 | exon | 20220812 | 20222468 | + | gene_id “aRMS_NG23”; transcript_id |
| | | | | | “aRMS_NG23.2”; exon “3”; |
| chr11 | transcript | 20184380 | 20222468 | + | gene_id “aRMS_NG23”; transcript_id |
| | | | | | “aRMS_NG23.1”; RPKM “1.2683”; cov |
| | | | | | “17.4895”; |
| chr11 | exon | 20184380 | 20185174 | + | gene_id “aRMS_NG23”; transcript_id |
| | | | | | “aRMS_NG23.1”; exon “1”; |
| chr11 | exon | 20209051 | 20209129 | + | gene_id “aRMS_NG23”; transcript_id |
| | | | | | “aRMS_NG23.1”; exon “2”; |
| chr11 | exon | 20220812 | 20222468 | + | gene_id “aRMS_NG23”; transcript_id |
| | | | | | “aRMS_NG23.1”; exon “3”; |
| chr11 | transcript | 71384875 | 71391010 | − | gene_id “aRMS_NG24”; transcript_id |
| | | | | | “aRMS_NG24.1”; RPKM “20.7618”; cov |
| | | | | | “286.3067”; |
| chr11 | exon | 71384875 | 71391010 | − | gene_id “aRMS_NG24”; transcript_id |
| | | | | | “aRMS_NG24.1”; exon “1”; |
| chr11 | transcript | 71391032 | 71395304 | − | gene_id “aRMS_NG25”; transcript_id |
| | | | | | “aRMS_NG25.1”; RPKM “3.3159”; cov |
| | | | | | “45.7260”; |
| chr11 | exon | 71391032 | 71395304 | − | gene_id “aRMS_NG25”; transcript_id |
| | | | | | “aRMS_NG25.1”; exon “1”; |
| chr13 | transcript | 27573827 | 27580633 | − | gene_id “aRMS_NG26”; transcript_id |
| | | | | | “aRMS_NG26.1”; RPKM “1.5525”; cov |
| | | | | | “21.4097”; |
| chr13 | exon | 27573827 | 27580633 | − | gene_id “aRMS_NG26”; transcript_id |
| | | | | | “aRMS_NG26.1”; exon “1”; |
| chr13 | transcript | 27573827 | 27581460 | − | gene_id “aRMS_NG26”; transcript_id |
| | | | | | “aRMS_NG26.2”; RPKM “1.7013”; cov |
| | | | | | “23.4610”; |
| chr13 | exon | 27573827 | 27575530 | − | gene_id “aRMS_NG26”; transcript_id |
| | | | | | “aRMS_NG26.2”; exon “1”; |
| chr13 | exon | 27576270 | 27576468 | − | gene_id “aRMS_NG26”; transcript_id |
| | | | | | “aRMS_NG26.2”; exon “2”; |
| chr13 | exon | 27581224 | 27581460 | − | gene_id “aRMS_NG26”; transcript_id |
| | | | | | “aRMS_NG26.2”; exon “3”; |
| chr13 | transcript | 104658677 | 104674357 | − | gene_id “aRMS_NG27”; transcript_id |
| | | | | | “aRMS_NG27.2”; RPKM “0.9192”; cov |
| | | | | | “12.6757”; |
| chr13 | exon | 104658677 | 104664120 | − | gene_id “aRMS_NG27”; transcript_id |
| | | | | | “aRMS_NG27.2”; exon “1”; |
| chr13 | exon | 104664379 | 104667144 | − | gene_id “aRMS_NG27”; transcript_id |
| | | | | | “aRMS_NG27.2”; exon “2”; |
| chr13 | exon | 104667854 | 104667921 | − | gene_id “aRMS_NG27”; transcript_id |
| | | | | | “aRMS_NG27.2”; exon “3”; |
| chr13 | exon | 104668785 | 104668908 | − | gene_id “aRMS_NG27”; transcript_id |
| | | | | | “aRMS_NG27.2”; exon “4”; |
| chr13 | exon | 104674255 | 104674357 | − | gene_id “aRMS_NG27”; transcript_id |
| | | | | | “aRMS_NG27.2”; exon “5”; |
| chr13 | transcript | 104667962 | 104674357 | − | gene_id “aRMS_NG27”; transcript_id |
| | | | | | “aRMS_NG27.1”; RPKM “1.0791”; cov |
| | | | | | “14.8805”; |
| chr13 | exon | 104667962 | 104668908 | − | gene_id “aRMS_NG27”; transcript_id |
| | | | | | “aRMS_NG27.1”; exon “1”; |
| chr13 | exon | 104674255 | 104674357 | − | gene_id “aRMS_NG27”; transcript_id |
| | | | | | “aRMS_NG27.1”; exon “2”; |
| chr17 | transcript | 76541142 | 76549365 | + | gene_id “aRMS_NG28”; transcript_id |
| | | | | | “aRMS_NG28.1”; RPKM “6.8005”; cov |
| | | | | | “93.7787”; |
| chr17 | exon | 76541142 | 76541264 | + | gene_id “aRMS_NG28”; transcript_id |
| | | | | | “aRMS_NG28.1”; exon “1”; |
| chr17 | exon | 76542082 | 76549365 | + | gene_id “aRMS_NG28”; transcript_id |
| | | | | | “aRMS_NG28.1”; exon “2”; |
| chr17 | transcript | 76541142 | 76549365 | + | gene_id “aRMS_NG28”; transcript_id |
| | | | | | “aRMS_NG28.2”; RPKM “1.4157”; cov |
| | | | | | “19.5220”; |
| chr17 | exon | 76541142 | 76541264 | + | gene_id “aRMS_NG28”; transcript_id |
| | | | | | “aRMS_NG28.2”; exon “1”; |
| chr17 | exon | 76541689 | 76549365 | + | gene_id “aRMS_NG28”; transcript_id |
| | | | | | “aRMS_NG28.2”; exon “2”; |
| chr17 | transcript | 76541142 | 76576389 | + | gene_id “aRMS_NG28”; transcript_id |
| | | | | | “aRMS_NG28.3”; RPKM “19.7431”; cov |
| | | | | | “272.2587”; |
| chr17 | exon | 76541142 | 76541264 | + | gene_id “aRMS_NG28”; transcript_id |
| | | | | | “aRMS_NG28.3”; exon “1”; |
| chr17 | exon | 76562497 | 76576389 | + | gene_id “aRMS_NG28”; transcript_id |
| | | | | | “aRMS_NG28.3”; exon “2”; |
| chr17 | transcript | 76541142 | 76576389 | + | gene_id “aRMS_NG28”; transcript_id |
| | | | | | “aRMS_NG28.4”; RPKM “15.7457”; cov |
| | | | | | “217.1337”; |
| chr17 | exon | 76541142 | 76552531 | + | gene_id “aRMS_NG28”; transcript_id |
| | | | | | “aRMS_NG28.4”; exon “1”; |
| chr17 | exon | 76562497 | 76576389 | + | gene_id “aRMS_NG28”; transcript_id |
| | | | | | “aRMS_NG28.4”; exon “2”; |
| chr17 | transcript | 76549408 | 76560136 | + | gene_id “aRMS_NG28”; transcript_id |
| | | | | | “aRMS_NG28.5”; RPKM “1.3354”; cov |
| | | | | | “18.4157”; |
| chr17 | exon | 76549408 | 76554529 | + | gene_id “aRMS_NG28”; transcript_id |
| | | | | | “aRMS_NG28.5”; exon “1”; |
| chr17 | exon | 76554552 | 76560136 | + | gene_id “aRMS_NG28”; transcript_id |
| | | | | | “aRMS_NG28.5”; exon “2”; |
| chr17 | transcript | 76549408 | 76560136 | + | gene_id “aRMS_NG28”; transcript_id |
| | | | | | “aRMS_NG28.6”; RPKM “1.7127”; cov |
| | | | | | “23.6176”; |
| chr17 | exon | 76549408 | 76560136 | + | gene_id “aRMS_NG28”; transcript_id |
| | | | | | “aRMS_NG28.6”; exon “1”; |
| chr19 | transcript | 57417319 | 57431910 | + | gene_id “aRMS_NG29”; transcript_id |
| | | | | | “aRMS_NG29.1”; RPKM “1.9098”; cov |
| | | | | | “26.3369”; |
| chr19 | exon | 57417319 | 57431910 | + | gene_id “aRMS_NG29”; transcript_id |
| | | | | | “aRMS_NG29.1”; exon “1”; |
| chr19 | transcript | 57598646 | 57609882 | + | gene_id “aRMS_NG30”; transcript_id |
| | | | | | “aRMS_NG30.2”; RPKM “0.7978”; cov |
| | | | | | “11.0013”; |
| chr19 | exon | 57598646 | 57598863 | + | gene_id “aRMS_NG30”; transcript_id |
| | | | | | “aRMS_NG30.2”; exon “1”; |
| chr19 | exon | 57599589 | 57599885 | + | gene_id “aRMS_NG30”; transcript_id |
| | | | | | “aRMS_NG30.2”; exon “2”; |
| chr19 | exon | 57601082 | 57609882 | + | gene_id “aRMS_NG30”; transcript_id |
| | | | | | “aRMS_NG30.2”; exon “3”; |
| chr19 | transcript | 57599288 | 57609882 | + | gene_id “aRMS_NG30”; transcript_id |
| | | | | | “aRMS_NG30.1”; RPKM “3.1613”; cov |
| | | | | | “43.5951”; |
| chr19 | exon | 57599288 | 57599885 | + | gene_id “aRMS_NG30”; transcript_id |
| | | | | | “aRMS_NG30.1”; exon “1”; |
| chr19 | exon | 57601082 | 57609882 | + | gene_id “aRMS_NG30”; transcript_id |
| | | | | | “aRMS_NG30.1”; exon “2”; |
| chr2 | transcript | 28563554 | 28568661 | − | gene_id “aRMS_NG3”; transcript_id |
| | | | | | “aRMS_NG3.1”; RPKM “1.3596”; cov |
| | | | | | “18.7490”; |
| chr2 | exon | 28563554 | 28567345 | − | gene_id “aRMS_NG3”; transcript_id |
| | | | | | “aRMS_NG3.1”; exon “1”; |
| chr2 | exon | 28567828 | 28568661 | − | gene_id “aRMS_NG3”; transcript_id |
| | | | | | “aRMS_NG3.1”; exon “2”; |
| chr2 | transcript | 28569716 | 28575724 | + | gene_id “aRMS_NG4”; transcript_id |
| | | | | | “aRMS_NG4.1”; RPKM “0.9699”; cov |
| | | | | | “13.3743”; |
| chr2 | exon | 28569716 | 28569913 | + | gene_id “aRMS_NG4”; transcript_id |
| | | | | | “aRMS_NG4.1”; exon “1”; |
| chr2 | exon | 28572231 | 28572389 | + | gene_id “aRMS_NG4”; transcript_id |
| | | | | | “aRMS_NG4.1”; exon “2”; |
| chr2 | exon | 28573133 | 28575724 | + | gene_id “aRMS_NG4”; transcript_id |
| | | | | | “aRMS_NG4.1”; exon “3”; |
| chr2 | transcript | 28581222 | 28588798 | + | gene_id “aRMS_NG4”; transcript_id |
| | | | | | “aRMS_NG4.2”; RPKM “0.8424”; cov |
| | | | | | “11.6167”; |
| chr2 | exon | 28581222 | 28585068 | + | gene_id “aRMS_NG4”; transcript_id |
| | | | | | “aRMS_NG4.2”; exon “1”; |
| chr2 | exon | 28585795 | 28586098 | + | gene_id “aRMS_NG4”; transcript_id |
| | | | | | “aRMS_NG4.2”; exon “2”; |
| chr2 | exon | 28587040 | 28588798 | + | gene_id “aRMS_NG4”; transcript_id |
| | | | | | “aRMS_NG4.2”; exon “3”; |
| chr2 | transcript | 28581222 | 28588798 | + | gene_id “aRMS_NG4”; transcript_id |
| | | | | | “aRMS_NG4.3”; RPKM “0.7655”; cov |
| | | | | | “10.5566”; |
| chr2 | exon | 28581222 | 28584621 | + | gene_id “aRMS_NG4”; transcript_id |
| | | | | | “aRMS_NG4.3”; exon “1”; |
| chr2 | exon | 28584947 | 28586098 | + | gene_id “aRMS_NG4”; transcript_id |
| | | | | | “aRMS_NG4.3”; exon “2”; |
| chr2 | exon | 28586955 | 28588798 | + | gene_id “aRMS_NG4”; transcript_id |
| | | | | | “aRMS_NG4.3”; exon “3”; |
| chr20 | transcript | 46428924 | 46474114 | − | gene_id “aRMS_NG31”; transcript_id |
| | | | | | “aRMS_NG31.1”; RPKM “1.7745”; cov |
| | | | | | “24.4700”; |
| chr20 | exon | 46428924 | 46452080 | − | gene_id “aRMS_NG31”; transcript_id |
| | | | | | “aRMS_NG31.1”; exon “1”; |
| chr20 | exon | 46469306 | 46474114 | − | gene_id “aRMS_NG31”; transcript_id |
| | | | | | “aRMS_NG31.1”; exon “2”; |
| chr20 | transcript | 46428924 | 46475805 | − | gene_id “aRMS_NG31”; transcript_id |
| | | | | | “aRMS_NG31.2”; RPKM “0.9184”; cov |
| | | | | | “12.6647”; |
| chr20 | exon | 46428924 | 46452080 | − | gene_id “aRMS_NG31”; transcript_id |
| | | | | | “aRMS_NG31.2”; exon “1”; |
| chr20 | exon | 46469306 | 46471101 | − | gene_id “aRMS_NG31”; transcript_id |
| | | | | | “aRMS_NG31.2”; exon “2”; |
| chr20 | exon | 46471923 | 46472032 | − | gene_id “aRMS_NG31”; transcript_id |
| | | | | | “aRMS_NG31.2”; exon “3”; |
| chr20 | exon | 46473327 | 46473445 | − | gene_id “aRMS_NG31”; transcript_id |
| | | | | | “aRMS_NG31.2”; exon “4”; |
| chr20 | exon | 46474829 | 46474940 | − | gene_id “aRMS_NG31”; transcript_id |
| | | | | | “aRMS_NG31.2”; exon “5”; |
| chr20 | exon | 46475236 | 46475805 | − | gene_id “aRMS_NG31”; transcript_id |
| | | | | | “aRMS_NG31.2”; exon “6”; |
| chr20 | transcript | 46428924 | 46475805 | − | gene_id “aRMS_NG31”; transcript_id |
| | | | | | “aRMS_NG31.3”; RPKM “4.0069”; cov |
| | | | | | “55.2560”; |
| chr20 | exon | 46428924 | 46452080 | − | gene_id “aRMS_NG31”; transcript_id |
| | | | | | “aRMS_NG31.3”; exon “1”; |
| chr20 | exon | 46469306 | 46472035 | − | gene_id “aRMS_NG31”; transcript_id |
| | | | | | “aRMS_NG31.3”; exon “2”; |
| chr20 | exon | 46473327 | 46473445 | − | gene_id “aRMS_NG31”; transcript_id |
| | | | | | “aRMS_NG31.3”; exon “3”; |
| chr20 | exon | 46474829 | 46474940 | − | gene_id “aRMS_NG31”; transcript_id |
| | | | | | “aRMS_NG31.3”; exon “4”; |
| chr20 | exon | 46475236 | 46475805 | − | gene_id “aRMS_NG31”; transcript_id |
| | | | | | “aRMS_NG31.3”; exon “5”; |
| chr20 | transcript | 46428924 | 46474114 | − | gene_id “aRMS_NG31”; transcript_id |
| | | | | | “aRMS_NG31.4”; RPKM “0.7667”; cov |
| | | | | | “10.5722”; |
| chr20 | exon | 46428924 | 46452080 | − | gene_id “aRMS_NG31”; transcript_id |
| | | | | | “aRMS_NG31.4”; exon “1”; |
| chr20 | exon | 46469306 | 46471101 | − | gene_id “aRMS_NG31”; transcript_id |
| | | | | | “aRMS_NG31.4”; exon “2”; |
| chr20 | exon | 46471923 | 46472035 | − | gene_id “aRMS_NG31”; transcript_id |
| | | | | | “aRMS_NG31.4”; exon “3”; |
| chr20 | exon | 46473327 | 46474114 | − | gene_id “aRMS_NG31”; transcript_id |
| | | | | | “aRMS_NG31.4”; exon “4”; |
| chr20 | transcript | 46428924 | 46475805 | − | gene_id “aRMS_NG31”; transcript_id |
| | | | | | “aRMS_NG31.5”; RPKM “6.3456”; cov |
| | | | | | “87.5059”; |
| chr20 | exon | 46428924 | 46452080 | − | gene_id “aRMS_NG31”; transcript_id |
| | | | | | “aRMS_NG31.5”; exon “1”; |
| chr20 | exon | 46469306 | 46471101 | − | gene_id “aRMS_NG31”; transcript_id |
| | | | | | “aRMS_NG31.5”; exon “2”; |
| chr20 | exon | 46471923 | 46472035 | − | gene_id “aRMS_NG31”; transcript_id |
| | | | | | “aRMS_NG31.5”; exon “3”; |
| chr20 | exon | 46473327 | 46473445 | − | gene_id “aRMS_NG31”; transcript_id |
| | | | | | “aRMS_NG31.5”; exon “4”; |
| chr20 | exon | 46474829 | 46474940 | − | gene_id “aRMS_NG31”; transcript_id |
| | | | | | “aRMS_NG31.5”; exon “5”; |
| chr20 | exon | 46475236 | 46475805 | − | gene_id “aRMS_NG31”; transcript_id |
| | | | | | “aRMS_NG31.5”; exon “6”; |
| chr21 | transcript | 38665986 | 38668816 | + | gene_id “aRMS_NG32”; transcript_id |
| | | | | | “aRMS_NG32.1”; RPKM “1.0943”; cov |
| | | | | | “15.0911”; |
| chr21 | exon | 38665986 | 38667410 | + | gene_id “aRMS_NG32”; transcript_id |
| | | | | | “aRMS_NG32.1”; exon “1”; |
| chr21 | exon | 38668375 | 38668816 | + | gene_id “aRMS_NG32”; transcript_id |
| | | | | | “aRMS_NG32.1”; exon “2”; |
| chr22 | transcript | 21386459 | 21391479 | + | gene_id “aRMS_NG33”; transcript_id |
| | | | | | “aRMS_NG33.1”; RPKM “2.3515”; cov |
| | | | | | “32.4278”; |
| chr22 | exon | 21386459 | 21391479 | + | gene_id “aRMS_NG33”; transcript_id |
| | | | | | “aRMS_NG33.1”; exon “1”; |
| chr22 | transcript | 26445016 | 26464871 | + | gene_id “aRMS_NG34”; transcript_id |
| | | | | | “aRMS_NG34.1”; RPKM “0.8321”; cov |
| | | | | | “11.4742”; |
| chr22 | exon | 26445016 | 26446624 | + | gene_id “aRMS_NG34”; transcript_id |
| | | | | | “aRMS_NG34.1”; exon “1”; |
| chr22 | exon | 26447440 | 26447531 | + | gene_id “aRMS_NG34”; transcript_id |
| | | | | | “aRMS_NG34.1”; exon “2”; |
| chr22 | exon | 26452329 | 26452488 | + | gene_id “aRMS_NG34”; transcript_id |
| | | | | | “aRMS_NG34.1”; exon “3”; |
| chr22 | exon | 26452588 | 26464871 | + | gene_id “aRMS_NG34”; transcript_id |
| | | | | | “aRMS_NG34.1”; exon “4”; |
| chr3 | transcript | 174019088 | 174026584 | − | gene_id “aRMS_NG5”; transcript_id |
| | | | | | “aRMS_NG5.1”; RPKM “4.3565”; cov |
| | | | | | “60.0765”; |
| chr3 | exon | 174019088 | 174020623 | − | gene_id “aRMS_NG5”; transcript_id |
| | | | | | “aRMS_NG5.1”; exon “1”; |
| chr3 | exon | 174026000 | 174026584 | − | gene_id “aRMS_NG5”; transcript_id |
| | | | | | “aRMS_NG5.1”; exon “2”; |
| chr3 | transcript | 174019088 | 174057277 | − | gene_id “aRMS_NG5”; transcript_id |
| | | | | | “aRMS_NG5.2”; RPKM “1.2396”; cov |
| | | | | | “17.0947”; |
| chr3 | exon | 174019088 | 174020623 | − | gene_id “aRMS_NG5”; transcript_id |
| | | | | | “aRMS_NG5.2”; exon “1”; |
| chr3 | exon | 174057129 | 174057277 | − | gene_id “aRMS_NG5”; transcript_id |
| | | | | | “aRMS_NG5.2”; exon “2”; |
| chr4 | transcript | 8396124 | 8396972 | + | gene_id “aRMS_NG6”; transcript_id |
| | | | | | “aRMS_NG6.1”; RPKM “2.5108”; cov |
| | | | | | “34.6243”; |
| chr4 | exon | 8396124 | 8396972 | + | gene_id “aRMS_NG6”; transcript_id |
| | | | | | “aRMS_NG6.1”; exon “1”; |
| chr4 | transcript | 8397151 | 8402660 | + | gene_id “aRMS_NG7”; transcript_id |
| | | | | | “aRMS_NG7.1”; RPKM “3.2380”; cov |
| | | | | | “44.6528”; |
| chr4 | exon | 8397151 | 8402660 | + | gene_id “aRMS_NG7”; transcript_id |
| | | | | | “aRMS_NG7.1”; exon “1”; |
| chr4 | transcript | 129503931 | 129554649 | + | gene_id “aRMS_NG8”; transcript_id |
| | | | | | “aRMS_NG8.1”; RPKM “1.7869”; cov |
| | | | | | “24.6409”; |
| chr4 | exon | 129503931 | 129504083 | + | gene_id “aRMS_NG8”; transcript_id |
| | | | | | “aRMS_NG8.1”; exon “1”; |
| chr4 | exon | 129551125 | 129554649 | + | gene_id “aRMS_NG8”; transcript_id |
| | | | | | “aRMS_NG8.1”; exon “2”; |
| chr4 | transcript | 129532346 | 129537825 | + | gene_id “aRMS_NG9”; transcript_id |
| | | | | | “aRMS_NG9.1”; RPKM “1.6663”; cov |
| | | | | | “22.9788”; |
| chr4 | exon | 129532346 | 129537825 | + | gene_id “aRMS_NG9”; transcript_id |
| | | | | | “aRMS_NG9.1”; exon “1”; |
| chr4 | transcript | 129537851 | 129540993 | + | gene_id “aRMS_NG10”; transcript_id |
| | | | | | “aRMS_NG10.1”; RPKM “2.7696”; cov |
| | | | | | “38.1925”; |
| chr4 | exon | 129537851 | 129540993 | + | gene_id “aRMS_NG10”; transcript_id |
| | | | | | “aRMS_NG10.1”; exon “1”; |
| chr4 | transcript | 129548522 | 129551102 | + | gene_id “aRMS_NG11”; transcript_id |
| | | | | | “aRMS_NG11.1”; RPKM “2.0706”; cov |
| | | | | | “28.5537”; |
| chr4 | exon | 129548522 | 129551102 | + | gene_id “aRMS_NG11”; transcript_id |
| | | | | | “aRMS_NG11.1”; exon “1”; |
| chr5 | transcript | 177515541 | 177542258 | − | gene_id “aRMS_NG12”; transcript_id |
| | | | | | “aRMS_NG12.1”; RPKM “1.3290”; cov |
| | | | | | “18.3274”; |
| chr5 | exon | 177515541 | 177515705 | − | gene_id “aRMS_NG12”; transcript_id |
| | | | | | “aRMS_NG12.1”; exon “1”; |
| chr5 | exon | 177518090 | 177518189 | − | gene_id “aRMS_NG12”; transcript_id |
| | | | | | “aRMS_NG12.1”; exon “2”; |
| chr5 | exon | 177520226 | 177520390 | − | gene_id “aRMS_NG12”; transcript_id |
| | | | | | “aRMS_NG12.1”; exon “3”; |
| chr5 | exon | 177542062 | 177542258 | − | gene_id “aRMS_NG12”; transcript_id |
| | | | | | “aRMS_NG12.1”; exon “4”; |
| chr6 | transcript | 23228518 | 23408352 | + | gene_id “aRMS_NG13”; transcript_id |
| | | | | | “aRMS_NG13.4”; RPKM “1.0148”; cov |
| | | | | | “13.9941”; |
| chr6 | exon | 23228518 | 23229280 | + | gene_id “aRMS_NG13”; transcript_id |
| | | | | | “aRMS_NG13.4”; exon “1”; |
| chr6 | exon | 23304101 | 23304154 | + | gene_id “aRMS_NG13”; transcript_id |
| | | | | | “aRMS_NG13.4”; exon “2”; |
| chr6 | exon | 23395032 | 23395165 | + | gene_id “aRMS_NG13”; transcript_id |
| | | | | | “aRMS_NG13.4”; exon “3”; |
| chr6 | exon | 23397482 | 23397706 | + | gene_id “aRMS_NG13”; transcript_id |
| | | | | | “aRMS_NG13.4”; exon “4”; |
| chr6 | exon | 23399158 | 23399350 | + | gene_id “aRMS_NG13”; transcript_id |
| | | | | | “aRMS_NG13.4”; exon “5”; |
| chr6 | exon | 23403169 | 23403351 | + | gene_id “aRMS_NG13”; transcript_id |
| | | | | | “aRMS_NG13.4”; exon “6”; |
| chr6 | exon | 23404092 | 23408352 | + | gene_id “aRMS_NG13”; transcript_id |
| | | | | | “aRMS_NG13.4”; exon “7”; |
| chr6 | transcript | 23228518 | 23408352 | + | gene_id “aRMS_NG13”; transcript_id |
| | | | | | “aRMS_NG13.3”; RPKM “1.3118”; cov |
| | | | | | “18.0896”; |
| chr6 | exon | 23228518 | 23229280 | + | gene_id “aRMS_NG13”; transcript_id |
| | | | | | “aRMS_NG13.3”; exon “1”; |
| chr6 | exon | 23304101 | 23304154 | + | gene_id “aRMS_NG13”; transcript_id |
| | | | | | “aRMS_NG13.3”; exon “2”; |
| chr6 | exon | 23395032 | 23395182 | + | gene_id “aRMS_NG13”; transcript_id |
| | | | | | “aRMS_NG13.3”; exon “3”; |
| chr6 | exon | 23397482 | 23397706 | + | gene_id “aRMS_NG13”; transcript_id |
| | | | | | “aRMS_NG13.3”; exon “4”; |
| chr6 | exon | 23398137 | 23398343 | + | gene_id “aRMS_NG13”; transcript_id |
| | | | | | “aRMS_NG13.3”; exon “5”; |
| chr6 | exon | 23399158 | 23399350 | + | gene_id “aRMS_NG13”; transcript_id |
| | | | | | “aRMS_NG13.3”; exon “6”; |
| chr6 | exon | 23403169 | 23403351 | + | gene_id “aRMS_NG13”; transcript_id |
| | | | | | “aRMS_NG13.3”; exon “7”; |
| chr6 | exon | 23404092 | 23408352 | + | gene_id “aRMS_NG13”; transcript_id |
| | | | | | “aRMS_NG13.3”; exon “8”; |
| chr6 | transcript | 23228518 | 23408352 | + | gene_id “aRMS_NG13”; transcript_id |
| | | | | | “aRMS_NG13.2”; RPKM “0.7512”; cov |
| | | | | | “10.3586”; |
| chr6 | exon | 23228518 | 23229280 | + | gene_id “aRMS_NG13”; transcript_id |
| | | | | | “aRMS_NG13.2”; exon “1”; |
| chr6 | exon | 23304101 | 23304154 | + | gene_id “aRMS_NG13”; transcript_id |
| | | | | | “aRMS_NG13.2”; exon “2”; |
| chr6 | exon | 23395032 | 23395165 | + | gene_id “aRMS_NG13”; transcript_id |
| | | | | | “aRMS_NG13.2”; exon “3”; |
| chr6 | exon | 23399158 | 23399350 | + | gene_id “aRMS_NG13”; transcript_id |
| | | | | | “aRMS_NG13.2”; exon “4”; |
| chr6 | exon | 23403169 | 23403351 | + | gene_id “aRMS_NG13”; transcript_id |
| | | | | | “aRMS_NG13.2”; exon “5”; |
| chr6 | exon | 23404092 | 23408352 | + | gene_id “aRMS_NG13”; transcript_id |
| | | | | | “aRMS_NG13.2”; exon “6”; |
| chr6 | transcript | 23400822 | 23408352 | + | gene_id “aRMS_NG13”; transcript_id |
| | | | | | “aRMS_NG13.1”; RPKM “1.9057”; cov |
| | | | | | “26.2803”; |
| chr6 | exon | 23400822 | 23403351 | + | gene_id “aRMS_NG13”; transcript_id |
| | | | | | “aRMS_NG13.1”; exon “1”; |
| chr6 | exon | 23404092 | 23408352 | + | gene_id “aRMS_NG13”; transcript_id |
| | | | | | “aRMS_NG13.1”; exon “2”; |
| chr6 | transcript | 44141763 | 44149316 | − | gene_id “aRMS_NG14”; transcript_id |
| | | | | | “aRMS_NG14.1”; RPKM “5.8352”; cov |
| | | | | | “80.4675”; |
| chr6 | exon | 44141763 | 44149316 | − | gene_id “aRMS_NG14”; transcript_id |
| | | | | | “aRMS_NG14.1”; exon “1”; |
| chr6 | transcript | 58137660 | 58147788 | − | gene_id “aRMS_NG15”; transcript_id |
| | | | | | “aRMS_NG15.1”; RPKM “1.6815”; cov |
| | | | | | “23.1882”; |
| chr6 | exon | 58137660 | 58141849 | − | gene_id “aRMS_NG15”; transcript_id |
| | | | | | “aRMS_NG15.1”; exon “1”; |
| chr6 | exon | 58142270 | 58142394 | − | gene_id “aRMS_NG15”; transcript_id |
| | | | | | “aRMS_NG15.1”; exon “2”; |
| chr6 | exon | 58142768 | 58142858 | − | gene_id “aRMS_NG15”; transcript_id |
| | | | | | “aRMS_NG15.1”; exon “3”; |
| chr6 | exon | 58147164 | 58147788 | − | gene_id “aRMS_NG15”; transcript_id |
| | | | | | “aRMS_NG15.1”; exon “4”; |
| chr6 | transcript | 58137660 | 58147788 | − | gene_id “aRMS_NG15”; transcript_id |
| | | | | | “aRMS_NG15.2”; RPKM “13.3887”; cov |
| | | | | | “184.6310”; |
| chr6 | exon | 58137660 | 58141849 | − | gene_id “aRMS_NG15”; transcript_id |
| | | | | | “aRMS_NG15.2”; exon “1”; |
| chr6 | exon | 58142270 | 58142858 | − | gene_id “aRMS_NG15”; transcript_id |
| | | | | | “aRMS_NG15.2”; exon “2”; |
| chr6 | exon | 58147164 | 58147788 | − | gene_id “aRMS_NG15”; transcript_id |
| | | | | | “aRMS_NG15.2”; exon “3”; |
| chr6 | transcript | 58137660 | 58147788 | − | gene_id “aRMS_NG15”; transcript_id |
| | | | | | “aRMS_NG15.3”; RPKM “10.3603”; cov |
| | | | | | “142.8692”; |
| chr6 | exon | 58137660 | 58141849 | − | gene_id “aRMS_NG15”; transcript_id |
| | | | | | “aRMS_NG15.3”; exon “1”; |
| chr6 | exon | 58142270 | 58142394 | − | gene_id “aRMS_NG15”; transcript_id |
| | | | | | “aRMS_NG15.3”; exon “2”; |
| chr6 | exon | 58142768 | 58146783 | − | gene_id “aRMS_NG15”; transcript_id |
| | | | | | “aRMS_NG15.3”; exon “3”; |
| chr6 | exon | 58147164 | 58147788 | − | gene_id “aRMS_NG15”; transcript_id |
| | | | | | “aRMS_NG15.3”; exon “4”; |
| chr6 | transcript | 58137660 | 58147788 | − | gene_id “aRMS_NG15”; transcript_id |
| | | | | | “aRMS_NG15.4”; RPKM “9.9952”; cov |
| | | | | | “137.8339”; |
| chr6 | exon | 58137660 | 58141849 | − | gene_id “aRMS_NG15”; transcript_id |
| | | | | | “aRMS_NG15.4”; exon “1”; |
| chr6 | exon | 58142270 | 58142394 | − | gene_id “aRMS_NG15”; transcript_id |
| | | | | | “aRMS_NG15.4”; exon “2”; |
| chr6 | exon | 58142768 | 58147788 | − | gene_id “aRMS_NG15”; transcript_id |
| | | | | | “aRMS_NG15.4”; exon “3”; |
| chr7 | transcript | 21181330 | 21196346 | + | gene_id “aRMS_NG16”; transcript_id |
| | | | | | “aRMS_NG16.1”; RPKM “1.2801”; cov |
| | | | | | “17.6532”; |
| chr7 | exon | 21181330 | 21181466 | + | gene_id “aRMS_NG16”; transcript_id |
| | | | | | “aRMS_NG16.1”; exon “1”; |
| chr7 | exon | 21183109 | 21183255 | + | gene_id “aRMS_NG16”; transcript_id |
| | | | | | “aRMS_NG16.1”; exon “2”; |
| chr7 | exon | 21196000 | 21196346 | + | gene_id “aRMS_NG16”; transcript_id |
| | | | | | “aRMS_NG16.1”; exon “3”; |
| chr7 | transcript | 21181330 | 21226342 | + | gene_id “aRMS_NG16”; transcript_id |
| | | | | | “aRMS_NG16.4”; RPKM “4.8782”; cov |
| | | | | | “67.2706”; |
| chr7 | exon | 21181330 | 21181466 | + | gene_id “aRMS_NG16”; transcript_id |
| | | | | | “aRMS_NG16.4”; exon “1”; |
| chr7 | exon | 21183109 | 21183255 | + | gene_id “aRMS_NG16”; transcript_id |
| | | | | | “aRMS_NG16.4”; exon “2”; |
| chr7 | exon | 21213219 | 21213297 | + | gene_id “aRMS_NG16”; transcript_id |
| | | | | | “aRMS_NG16.4”; exon “3”; |
| chr7 | exon | 21224748 | 21225268 | + | gene_id “aRMS_NG16”; transcript_id |
| | | | | | “aRMS_NG16.4”; exon “4”; |
| chr7 | exon | 21225368 | 21226342 | + | gene_id “aRMS_NG16”; transcript_id |
| | | | | | “aRMS_NG16.4”; exon “5”; |
| chr7 | transcript | 21181330 | 21213989 | + | gene_id “aRMS_NG16”; transcript_id |
| | | | | | “aRMS_NG16.3”; RPKM “0.7341”; cov |
| | | | | | “10.1231”; |
| chr7 | exon | 21181330 | 21181466 | + | gene_id “aRMS_NG16”; transcript_id |
| | | | | | “aRMS_NG16.3”; exon “1”; |
| chr7 | exon | 21183109 | 21183255 | + | gene_id “aRMS_NG16”; transcript_id |
| | | | | | “aRMS_NG16.3”; exon “2”; |
| chr7 | exon | 21213219 | 21213989 | + | gene_id “aRMS_NG16”; transcript_id |
| | | | | | “aRMS_NG16.3”; exon “3”; |
| chr7 | transcript | 21221439 | 21226342 | + | gene_id “aRMS_NG16”; transcript_id |
| | | | | | “aRMS_NG16.2”; RPKM “3.2121”; cov |
| | | | | | “44.2951”; |
| chr7 | exon | 21221439 | 21225268 | + | gene_id “aRMS_NG16”; transcript_id |
| | | | | | “aRMS_NG16.2”; exon “1”; |
| chr7 | exon | 21225368 | 21226342 | + | gene_id “aRMS_NG16”; transcript_id |
| | | | | | “aRMS_NG16.2”; exon “2”; |
| chr7 | transcript | 21243598 | 21253288 | + | gene_id “aRMS_NG16”; transcript_id |
| | | | | | “aRMS_NG16.5”; RPKM “2.4381”; cov |
| | | | | | “33.6209”; |
| chr7 | exon | 21243598 | 21246606 | + | gene_id “aRMS_NG16”; transcript_id |
| | | | | | “aRMS_NG16.5”; exon “1”; |
| chr7 | exon | 21247751 | 21247959 | + | gene_id “aRMS_NG16”; transcript_id |
| | | | | | “aRMS_NG16.5”; exon “2”; |
| chr7 | exon | 21249037 | 21249190 | + | gene_id “aRMS_NG16”; transcript_id |
| | | | | | “aRMS_NG16.5”; exon “3”; |
| chr7 | exon | 21252579 | 21253288 | + | gene_id “aRMS_NG16”; transcript_id |
| | | | | | “aRMS_NG16.5”; exon “4”; |
| chr7 | transcript | 21243598 | 21253288 | + | gene_id “aRMS_NG16”; transcript_id |
| | | | | | “aRMS_NG16.6”; RPKM “1.0126”; cov |
| | | | | | “13.9639”; |
| chr7 | exon | 21243598 | 21246869 | + | gene_id “aRMS_NG16”; transcript_id |
| | | | | | “aRMS_NG16.6”; exon “1”; |
| chr7 | exon | 21247751 | 21247959 | + | gene_id “aRMS_NG16”; transcript_id |
| | | | | | “aRMS_NG16.6”; exon “2”; |
| chr7 | exon | 21249037 | 21249190 | + | gene_id “aRMS_NG16”; transcript_id |
| | | | | | “aRMS_NG16.6”; exon “3”; |
| chr7 | exon | 21252579 | 21253288 | + | gene_id “aRMS_NG16”; transcript_id |
| | | | | | “aRMS_NG16.6”; exon “4”; |
| chr7 | transcript | 21243598 | 21253288 | + | gene_id “aRMS_NG16”; transcript_id |
| | | | | | “aRMS_NG16.7”; RPKM “15.4019”; cov |
| | | | | | “212.3930”; |
| chr7 | exon | 21243598 | 21247959 | + | gene_id “aRMS_NG16”; transcript_id |
| | | | | | “aRMS_NG16.7”; exon “1”; |
| chr7 | exon | 21249037 | 21249190 | + | gene_id “aRMS_NG16”; transcript_id |
| | | | | | “aRMS_NG16.7”; exon “2”; |
| chr7 | exon | 21252579 | 21253288 | + | gene_id “aRMS_NG16”; transcript_id |
| | | | | | “aRMS_NG16.7”; exon “3”; |
| chr8 | transcript | 41297207 | 41305208 | − | gene_id “aRMS_NG17”; transcript_id |
| | | | | | “aRMS_NG17.1”; RPKM “1.6833”; cov |
| | | | | | “23.2131”; |
| chr8 | exon | 41297207 | 41297935 | − | gene_id “aRMS_NG17”; transcript_id |
| | | | | | “aRMS_NG17.1”; exon “1”; |
| chr8 | exon | 41300116 | 41300269 | − | gene_id “aRMS_NG17”; transcript_id |
| | | | | | “aRMS_NG17.1”; exon “2”; |
| chr8 | exon | 41304960 | 41305208 | − | gene_id “aRMS_NG17”; transcript_id |
| | | | | | “aRMS_NG17.1”; exon “3”; |
| chr9 | transcript | 38674710 | 38677849 | − | gene_id “aRMS_NG18”; transcript_id |
| | | | | | “aRMS_NG18.1”; RPKM “1.4443”; cov |
| | | | | | “19.9172”; |
| chr9 | exon | 38674710 | 38676393 | − | gene_id “aRMS_NG18”; transcript_id |
| | | | | | “aRMS_NG18.1”; exon “1”; |
| chr9 | exon | 38677121 | 38677849 | − | gene_id “aRMS_NG18”; transcript_id |
| | | | | | “aRMS_NG18.1”; exon “2”; |
| chr9 | transcript | 70914397 | 70918487 | − | gene_id “aRMS_NG19”; transcript_id |
| | | | | | “aRMS_NG19.1”; RPKM “5.8290”; cov |
| | | | | | “80.3818”; |
| chr9 | exon | 70914397 | 70918487 | − | gene_id “aRMS_NG19”; transcript_id |
| | | | | | “aRMS_NG19.1”; exon “1”; |
| chr9 | transcript | 139595470 | 139596560 | + | gene_id “aRMS_NG20”; transcript_id |
| | | | | | “aRMS_NG20.2”; RPKM “1.6449”; cov |
| | | | | | “22.6837”; |
| chr9 | exon | 139595470 | 139596560 | + | gene_id “aRMS_NG20”; transcript_id |
| | | | | | “aRMS_NG20.2”; exon “1”; |
| chr9 | transcript | 139599667 | 139603134 | + | gene_id “aRMS_NG20”; transcript_id |
| | | | | | “aRMS_NG20.1”; RPKM “2.7191”; cov |
| | | | | | “37.4965”; |
| chr9 | exon | 139599667 | 139603134 | + | gene_id “aRMS_NG20”; transcript_id |
| | | | | | “aRMS_NG20.1”; exon “1”; |
| chrX | transcript | 47658608 | 47663864 | − | gene_id “aRMS_NG35”; transcript_id |
| | | | | | “aRMS_NG35.1”; RPKM “5.1432”; cov |
| | | | | | “70.9254”; |
| chrX | exon | 47658608 | 47663553 | − | gene_id “aRMS_NG35”; transcript_id |
| | | | | | “aRMS_NG35.1”; exon “1”; |
| chrX | exon | 47663769 | 47663864 | − | gene_id “aRMS_NG35”; transcript_id |
| | | | | | “aRMS_NG35.1”; exon “2”; |
| chrX | transcript | 47658608 | 47663864 | − | gene_id “aRMS_NG35”; transcript_id |
| | | | | | “aRMS_NG35.2”; RPKM “1.5505”; cov |
| | | | | | “21.3817”; |
| chrX | exon | 47658608 | 47663186 | − | gene_id “aRMS_NG35”; transcript_id |
| | | | | | “aRMS_NG35.2”; exon “1”; |
| chrX | exon | 47663375 | 47663553 | − | gene_id “aRMS_NG35”; transcript_id |
| | | | | | “aRMS_NG35.2”; exon “2”; |
| chrX | exon | 47663769 | 47663864 | − | gene_id “aRMS_NG35”; transcript_id |
| | | | | | “aRMS_NG35.2”; exon “3”; |
| chrX | transcript | 100849711 | 100852909 | − | gene_id “aRMS_NG36”; transcript_id |
| | | | | | “aRMS_NG36.1”; RPKM “0.7543”; cov |
| | | | | | “10.4015”; |
| chrX | exon | 100849711 | 100851871 | − | gene_id “aRMS_NG36”; transcript_id |
| | | | | | “aRMS_NG36.1”; exon “1”; |
| chrX | exon | 100851972 | 100852909 | − | gene_id “aRMS_NG36”; transcript_id |
| | | | | | “aRMS_NG36.1”; exon “2”; |
| chrX | transcript | 100849711 | 100852909 | − | gene_id “aRMS_NG36”; transcript_id |
| | | | | | “aRMS_NG36.2”; RPKM “3.1388”; cov |
| | | | | | “43.2842”; |
| chrX | exon | 100849711 | 100852909 | − | gene_id “aRMS_NG36”; transcript_id |
| | | | | | “aRMS_NG36.2”; exon “1”; |
| chr17 | transcript | 8029992 | 8030281 | − | gene_id “BCOR_NG6”; transcript_id |
| | | | | | “BOOR NG6.1”; RPKM “1.1532”; cov |
| | | | | | “20.9793”; |
| chr17 | exon | 8029992 | 8030281 | − | gene_id “BCOR_NG6”; transcript_id |
| | | | | | “BCOR_NG6.1”; exon “1”; |
| chr5 | transcript | 2707873 | 2714605 | − | gene_id “BCOR_NG1”; transcript_id |
| | | | | | “BCOR_NG1.1”; RPKM “1.5621”; cov |
| | | | | | “28.4169”; |
| chr5 | exon | 2707873 | 2714605 | − | gene_id “BCOR_NG1”; transcript_id |
| | | | | | “BCOR_NG1.1”; exon “1”; |
| chr6 | transcript | 137239596 | 137243510 | − | gene_id “BCOR_NG2”; transcript_id |
| | | | | | “BCOR_NG2.1”; RPKM “4.8026”; cov |
| | | | | | “87.3659”; |
| chr6 | exon | 137239596 | 137243510 | − | gene_id “BCOR_NG2”; transcript_id |
| | | | | | “BCOR_NG2.1”; exon “1”; |
| chr6 | transcript | 137243518 | 137244385 | − | gene_id “BCOR_NG3”; transcript_id |
| | | | | | “BOOR NG3.1”; RPKM “6.2187”; cov |
| | | | | | “113.1279”; |
| chr6 | exon | 137243518 | 137244385 | − | gene_id “BCOR_NG3”; transcript_id |
| | | | | | “BCOR_NG3.1”; exon “1”; |
| chr7 | transcript | 1709521 | 1709794 | + | gene_id “BCOR_NG4”; transcript_id |
| | | | | | “BCOR_NG4.1”; RPKM “9.1474”; cov |
| | | | | | “166.4059”; |
| chr7 | exon | 1709521 | 1709794 | + | gene_id “BCOR_NG4”; transcript_id |
| | | | | | “BCOR_NG4.1”; exon “1”; |
| chr9 | transcript | 99896877 | 99897463 | − | gene_id “BCOR_NG5”; transcript_id |
| | | | | | “BCOR_NG5.1”; RPKM “9.3141”; cov |
| | | | | | “169.4378”; |
| chr9 | exon | 99896877 | 99897463 | − | gene_id “BCOR_NG5”; transcript_id |
| | | | | | “BCOR_NG5.1”; exon “1”; |
| chr11 | transcript | 134451325 | 134454292 | − | gene_id “CCS_NG8”; transcript_id |
| | | | | | “CCS_NG8.1”; RPKM “1.4735”; cov |
| | | | | | “23.4078”; |
| chr11 | exon | 134451325 | 134451453 | − | gene_id “CCS_NG8”; transcript_id |
| | | | | | “CCS_NG8.1”; exon “1”; |
| chr11 | exon | 134453612 | 134454292 | − | gene_id “CCS_NG8”; transcript_id |
| | | | | | “CCS_NG8.1”; exon “2”; |
| chr13 | transcript | 24042286 | 24053871 | − | gene_id “CCS_NG9”; transcript_id |
| | | | | | “CCS_NG9.1”; RPKM “1.2721”; cov |
| | | | | | “20.2076”; |
| chr13 | exon | 24042286 | 24053871 | − | gene_id “CCS_NG9”; transcript_id |
| | | | | | “CCS_NG9.1”; exon “1”; |
| chr13 | transcript | 24077827 | 24119254 | − | gene_id “CCS_NG10”; transcript_id |
| | | | | | “CCS_NG10.1”; RPKM “0.6573”; cov |
| | | | | | “10.4417”; |
| chr13 | exon | 24077827 | 24079692 | − | gene_id “CCS_NG10”; transcript_id |
| | | | | | “CCS_NG10.1”; exon “1”; |
| chr13 | exon | 24106933 | 24107104 | − | gene_id “CCS_NG10”; transcript_id |
| | | | | | “CCS_NG10.1”; exon “2”; |
| chr13 | exon | 24108270 | 24108606 | − | gene_id “CCS_NG10”; transcript_id |
| | | | | | “CCS_NG10.1”; exon “3”; |
| chr13 | exon | 24119056 | 24119254 | − | gene_id “CCS_NG10”; transcript_id |
| | | | | | “CCS_NG10.1”; exon “4”; |
| chr15 | transcript | 101661721 | 101662920 | + | gene_id “CCS_NG11”; transcript_id |
| | | | | | “CCS_NG11.1”; RPKM “1.8440”; cov |
| | | | | | “29.2938”; |
| chr15 | exon | 101661721 | 101662920 | + | gene_id “CCS_NG11”; transcript_id |
| | | | | | “CCS_NG11.1”; exon “1”; |
| chr17 | transcript | 75878857 | 75881424 | + | gene_id “CCS_NG12”; transcript_id |
| | | | | | “CCS_NG12.1”; RPKM “11.6927”; cov |
| | | | | | “185.7470”; |
| chr17 | exon | 75878857 | 75881424 | + | gene_id “CCS_NG12”; transcript_id |
| | | | | | “CCS_NG12.1”; exon “1”; |
| chr17 | transcript | 75881718 | 75884774 | + | gene_id “CCS_NG13”; transcript_id |
| | | | | | “CCS_NG13.1”; RPKM “6.6437”; cov |
| | | | | | “105.5400”; |
| chr17 | exon | 75881718 | 75884774 | + | gene_id “CCS_NG13”; transcript_id |
| | | | | | “CCS_NG13.1”; exon “1”; |
| chr20 | transcript | 60496906 | 60500873 | − | gene_id “CCS_NG14”; transcript_id |
| | | | | | “CCS_NG14.1”; RPKM “1.1475”; cov |
| | | | | | “18.2292”; |
| chr20 | exon | 60496906 | 60499589 | − | gene_id “CCS_NG14”; transcript_id |
| | | | | | “CCS_NG14.1”; exon “1”; |
| chr20 | exon | 60499834 | 60499897 | − | gene_id “CCS_NG14”; transcript_id |
| | | | | | “COS NG14.1”; exon “2”; |
| chr20 | exon | 60500429 | 60500873 | − | gene_id “CCS_NG14”; transcript_id |
| | | | | | “CCS_NG14.1”; exon “3”; |
| chr20 | transcript | 60496906 | 60500873 | − | gene_id “CCS_NG14”; transcript_id |
| | | | | | “CCS_NG14.2”; RPKM “2.7225”; cov |
| | | | | | “43.2492”; |
| chr20 | exon | 60496906 | 60500873 | − | gene_id “CCS_NG14”; transcript_id |
| | | | | | “CCS_NG14.2”; exon “1”; |
| chr20 | transcript | 60496906 | 60500873 | − | gene_id “CCS_NG14”; transcript_id |
| | | | | | “CCS_NG14.3”; RPKM “4.9048”; cov |
| | | | | | “77.9159”; |
| chr20 | exon | 60496906 | 60499897 | − | gene_id “CCS_NG14”; transcript_id |
| | | | | | “CCS_NG14.3”; exon “1”; |
| chr20 | exon | 60500429 | 60500873 | − | gene_id “CCS_NG14”; transcript_id |
| | | | | | “CCS_NG14.3”; exon “2”; |
| chr5 | transcript | 6773174 | 6773937 | + | gene_id “CCS_NG1”; transcript_id |
| | | | | | “CCS_NG1.1”; RPKM “0.9169”; cov |
| | | | | | “14.5652”; |
| chr5 | exon | 6773174 | 6773334 | + | gene_id “CCS_NG1”; transcript_id |
| | | | | | “CCS_NG1.1”; exon “1”; |
| chr5 | exon | 6773568 | 6773937 | + | gene_id “CCS_NG1”; transcript_id |
| | | | | | “CCS_NG1.1”; exon “2”; |
| chr5 | transcript | 15066053 | 15072044 | − | gene_id “CCS_NG2”; transcript_id |
| | | | | | “CCS_NG2.1”; RPKM “0.6364”; cov |
| | | | | | “10.1093”; |
| chr5 | exon | 15066053 | 15066397 | − | gene_id “CCS_NG2”; transcript_id |
| | | | | | “CCS_NG2.1”; exon “1”; |
| chr5 | exon | 15068595 | 15072044 | − | gene_id “CCS_NG2”; transcript_id |
| | | | | | “CCS_NG2.1”; exon “2”; |
| chr5 | transcript | 15081079 | 15097665 | − | gene_id “CCS_NG2”; transcript_id |
| | | | | | “CCS_NG2.2”; RPKM “0.9396”; cov |
| | | | | | “14.9259”; |
| chr5 | exon | 15081079 | 15081814 | − | gene_id “CCS_NG2”; transcript_id |
| | | | | | “CCS_NG2.2”; exon “1”; |
| chr5 | exon | 15082978 | 15086448 | − | gene_id “CCS_NG2”; transcript_id |
| | | | | | “CCS_NG2.2”; exon “2”; |
| chr5 | exon | 15097230 | 15097665 | − | gene_id “CCS_NG2”; transcript_id |
| | | | | | “CCS_NG2.2”; exon “3”; |
| chr5 | transcript | 15081079 | 15097665 | − | gene_id “CCS_NG2”; transcript_id |
| | | | | | “CCS_NG2.3”; RPKM “0.6475”; cov |
| | | | | | “10.2855”; |
| chr5 | exon | 15081079 | 15086448 | − | gene_id “CCS_NG2”; transcript_id |
| | | | | | “CCS_NG2.3”; exon “1”; |
| chr5 | exon | 15097230 | 15097665 | − | gene_id “CCS_NG2”; transcript_id |
| | | | | | “CCS_NG2.3”; exon “2”; |
| chr6 | transcript | 369156 | 387345 | − | gene_id “CCS_NG3”; transcript_id |
| | | | | | “CCS_NG3.1”; RPKM “2.2894”; cov |
| | | | | | “36.3695”; |
| chr6 | exon | 369156 | 385963 | − | gene_id “CCS_NG3”; transcript_id |
| | | | | | “CCS_NG3.1”; exon “1”; |
| chr6 | exon | 386981 | 387345 | − | gene_id “CCS_NG3”; transcript_id |
| | | | | | “CCS_NG3.1”; exon “2”; |
| chr6 | transcript | 369156 | 387345 | − | gene_id “CCS_NG3”; transcript_id |
| | | | | | “CCS_NG3.2”; RPKM “1.4191”; cov |
| | | | | | “22.5438”; |
| chr6 | exon | 369156 | 386277 | − | gene_id “CCS_NG3”; transcript_id |
| | | | | | “CCS_NG3.2”; exon “1”; |
| chr6 | exon | 386981 | 387345 | − | gene_id “CCS_NG3”; transcript_id |
| | | | | | “CCS_NG3.2”; exon “2”; |
| chr6 | transcript | 369156 | 387345 | − | gene_id “CCS_NG3”; transcript_id |
| | | | | | “CCS_NG3.3”; RPKM “5.4322”; cov |
| | | | | | “86.2941”; |
| chr6 | exon | 369156 | 387345 | − | gene_id “CCS_NG3”; transcript_id |
| | | | | | “CCS_NG3.3”; exon “1”; |
| chr6 | transcript | 170336545 | 170346969 | − | gene_id “CCS_NG4”; transcript_id |
| | | | | | “CCS_NG4.1”; RPKM “2.1722”; cov |
| | | | | | “34.5074”; |
| chr6 | exon | 170336545 | 170346969 | − | gene_id “CCS_NG4”; transcript_id |
| | | | | | “CCS_NG4.1”; exon “1”; |
| chr6 | transcript | 170336545 | 170346969 | − | gene_id “CCS_NG4”; transcript_id |
| | | | | | “CCS_NG4.2”; RPKM “2.8185”; cov |
| | | | | | “44.7739”; |
| chr6 | exon | 170336545 | 170345549 | − | gene_id “CCS_NG4”; transcript_id |
| | | | | | “CCS_NG4.2”; exon “1”; |
| chr6 | exon | 170346508 | 170346969 | − | gene_id “CCS_NG4”; transcript_id |
| | | | | | “CCS_NG4.2”; exon “2”; |
| chr6 | transcript | 170336545 | 170346969 | − | gene_id “CCS_NG4”; transcript_id |
| | | | | | “CCS_NG4.3”; RPKM “0.8487”; cov |
| | | | | | “13.4816”; |
| chr6 | exon | 170336545 | 170345113 | − | gene_id “CCS_NG4”; transcript_id |
| | | | | | “CCS_NG4.3”; exon “1”; |
| chr6 | exon | 170345325 | 170346969 | − | gene_id “CCS_NG4”; transcript_id |
| | | | | | “CCS_NG4.3”; exon “2”; |
| chr6 | transcript | 170336545 | 170346969 | − | gene_id “CCS_NG4”; transcript_id |
| | | | | | “CCS_NG4.4”; RPKM “0.8487”; cov |
| | | | | | “13.4816”; |
| chr6 | exon | 170336545 | 170345113 | − | gene_id “CCS_NG4”; transcript_id |
| | | | | | “CCS_NG4.4”; exon “1”; |
| chr6 | exon | 170345325 | 170345549 | − | gene_id “CCS_NG4”; transcript_id |
| | | | | | “CCS_NG4.4”; exon “2”; |
| chr6 | exon | 170346508 | 170346969 | − | gene_id “CCS_NG4”; transcript_id |
| | | | | | “CCS_NG4.4”; exon “3”; |
| chr6_mcf_hap5 | transcript | 4605092 | 4606016 | − | gene_id “CCS_NG15”; transcript_id |
| | | | | | “CCS_NG15.1”; RPKM “2.9833”; cov |
| | | | | | “47.3916”; |
| chr6_mcf_hap5 | exon | 4605092 | 4606016 | − | gene_id “CCS_NG15”; transcript_id |
| | | | | | “CCS_NG15.1”; exon “1”; |
| chr8 | transcript | 123350339 | 123398217 | − | gene_id “CCS_NG5”; transcript_id |
| | | | | | “CCS_NG5.1”; RPKM “1.3597”; cov |
| | | | | | “21.5996”; |
| chr8 | exon | 123350339 | 123351435 | − | gene_id “CCS_NG5”; transcript_id |
| | | | | | “CCS_NG5.1”; exon “1”; |
| chr8 | exon | 123391653 | 123398217 | − | gene_id “CCS_NG5”; transcript_id |
| | | | | | “CCS_NG5.1”; exon “2”; |
| chr8 | transcript | 123485277 | 123489187 | − | gene_id “CCS_NG7”; transcript_id |
| | | | | | “CCS_NG7.1”; RPKM “2.6632”; cov |
| | | | | | “42.3076”; |
| chr8 | exon | 123485277 | 123489187 | − | gene_id “CCS_NG7”; transcript_id |
| | | | | | “CCS_NG7.1”; exon “1”; |
| chr8 | transcript | 123662431 | 123666910 | − | gene_id “CCS_NG6”; transcript_id |
| | | | | | “CCS_NG6.1”; RPKM “1.6155”; cov |
| | | | | | “25.6629”; |
| chr8 | exon | 123662431 | 123666910 | − | gene_id “CCS_NG6”; transcript_id |
| | | | | | “CCS_NG6.1”; exon “1”; |
| chr10 | transcript | 1585047 | 1587025 | + | gene_id “CIC_NG3”; transcript_id |
| | | | | | “CIC_NG3.1”; RPKM “2.4429”; cov |
| | | | | | “33.7457”; |
| chr10 | exon | 1585047 | 1587025 | + | gene_id “CIC_NG3”; transcript_id |
| | | | | | “CIC_NG3.1”; exon “1”; |
| chr11 | transcript | 127957209 | 128107409 | − | gene_id “CIC_NG4”; transcript_id |
| | | | | | “CIC_NG4.2”; RPKM “3.2069”; cov |
| | | | | | “44.3001”; |
| chr11 | exon | 127957209 | 127957760 | − | gene_id “CIC_NG4”; transcript_id |
| | | | | | “CIC_NG4.2”; exon “1”; |
| chr11 | exon | 128106139 | 128106205 | − | gene_id “CIC_NG4”; transcript_id |
| | | | | | “CIC_NG4.2”; exon “2”; |
| chr11 | exon | 128106796 | 128107409 | − | gene_id “CIC_NG4”; transcript_id |
| | | | | | “CIC_NG4.2”; exon “3”; |
| chr11 | transcript | 127957209 | 128063759 | − | gene_id “CIC_NG4”; transcript_id |
| | | | | | “CIC_NG4.1”; RPKM “5.7983”; cov |
| | | | | | “80.0970”; |
| chr11 | exon | 127957209 | 127957760 | − | gene_id “CIC_NG4”; transcript_id |
| | | | | | “CIC_NG4.1”; exon “1”; |
| chr11 | exon | 128062757 | 128063759 | − | gene_id “CIC_NG4”; transcript_id |
| | | | | | “CIC_NG4.1”; exon “2”; |
| chr11 | transcript | 127957209 | 128063759 | − | gene_id “CIC_NG4”; transcript_id |
| | | | | | “CIC_NG4.4”; RPKM “1.4642”; cov |
| | | | | | “20.2259”; |
| chr11 | exon | 127957209 | 127957760 | − | gene_id “CIC_NG4”; transcript_id |
| | | | | | “CIC_NG4.4”; exon “1”; |
| chr11 | exon | 128053701 | 128053841 | − | gene_id “CIC_NG4”; transcript_id |
| | | | | | “CIC_NG4.4”; exon “2”; |
| chr11 | exon | 128062757 | 128063759 | − | gene_id “CIC_NG4”; transcript_id |
| | | | | | “CIC_NG4.4”; exon “3”; |
| chr11 | transcript | 127957209 | 128107409 | − | gene_id “CIC_NG4”; transcript_id |
| | | | | | “CIC_NG4.3”; RPKM “1.2670”; cov |
| | | | | | “17.5016”; |
| chr11 | exon | 127957209 | 127957760 | − | gene_id “CIC_NG4”; transcript_id |
| | | | | | “CIC_NG4.3”; exon “1”; |
| chr11 | exon | 128053701 | 128053841 | − | gene_id “CIC_NG4”; transcript_id |
| | | | | | “CIC_NG4.3”; exon “2”; |
| chr11 | exon | 128106139 | 128106205 | − | gene_id “CIC_NG4”; transcript_id |
| | | | | | “CIC_NG4.3”; exon “3”; |
| chr11 | exon | 128106796 | 128107409 | − | gene_id “CIC_NG4”; transcript_id |
| | | | | | “CIC_NG4.3”; exon “4”; |
| chr11 | transcript | 128160177 | 128166003 | + | gene_id “CIC_NG5”; transcript_id |
| | | | | | “CIC_NG5.1”; RPKM “3.4212”; cov |
| | | | | | “47.2600”; |
| chr11 | exon | 128160177 | 128166003 | + | gene_id “CIC_NG5”; transcript_id |
| | | | | | “CIC_NG5.1”; exon “1”; |
| chr12 | transcript | 4136824 | 4233631 | + | gene_id “CIC_NG6”; transcript_id |
| | | | | | “CIC_NG6.3”; RPKM “1.8071”; cov |
| | | | | | “24.9635”; |
| chr12 | exon | 4136824 | 4137037 | + | gene_id “CIC_NG6”; transcript_id |
| | | | | | “CIC_NG6.3”; exon “1”; |
| chr12 | exon | 4145480 | 4145574 | + | gene_id “CIC_NG6”; transcript_id |
| | | | | | “CIC_NG6.3”; exon “2”; |
| chr12 | exon | 4232458 | 4233631 | + | gene_id “CIC_NG6”; transcript_id |
| | | | | | “CIC_NG6.3”; exon “3”; |
| chr12 | transcript | 4136824 | 4158306 | + | gene_id “CIC_NG6”; transcript_id |
| | | | | | “CIC_NG6.1”; RPKM “2.4306”; cov |
| | | | | | “33.5761”; |
| chr12 | exon | 4136824 | 4137037 | + | gene_id “CIC_NG6”; transcript_id |
| | | | | | “CIC_NG6.1”; exon “1”; |
| chr12 | exon | 4145480 | 4145574 | + | gene_id “CIC_NG6”; transcript_id |
| | | | | | “CIC_NG6.1”; exon “2”; |
| chr12 | exon | 4156756 | 4158306 | + | gene_id “CIC_NG6”; transcript_id |
| | | | | | “CIC_NG6.1”; exon “3”; |
| chr12 | transcript | 4136824 | 4184020 | + | gene_id “CIC_NG6”; transcript_id |
| | | | | | “CIC_NG6.2”; RPKM “4.3612”; cov |
| | | | | | “60.2453”; |
| chr12 | exon | 4136824 | 4137037 | + | gene_id “CIC_NG6”; transcript_id |
| | | | | | “CIC_NG6.2”; exon “1”; |
| chr12 | exon | 4145480 | 4145574 | + | gene_id “CIC_NG6”; transcript_id |
| | | | | | “CIC_NG6.2”; exon “2”; |
| chr12 | exon | 4183752 | 4184020 | + | gene_id “CIC_NG6”; transcript_id |
| | | | | | “CIC_NG6.2”; exon “3”; |
| chr12 | transcript | 4233680 | 4248549 | + | gene_id “CIC_NG6”; transcript_id |
| | | | | | “CIC_NG6.4”; RPKM “1.8038”; cov |
| | | | | | “24.9169”; |
| chr12 | exon | 4233680 | 4248549 | + | gene_id “CIC_NG6”; transcript_id |
| | | | | | “CIC_NG6.4”; exon “1”; |
| chr12 | transcript | 129193358 | 129227492 | + | gene_id “CIC_NG7”; transcript_id |
| | | | | | “CIC_NG7.1”; RPKM “2.5434”; cov |
| | | | | | “35.1344”; |
| chr12 | exon | 129193358 | 129193654 | + | gene_id “CIC_NG7”; transcript_id |
| | | | | | “CIC_NG7.1”; exon “1”; |
| chr12 | exon | 129206945 | 129207255 | + | gene_id “CIC_NG7”; transcript_id |
| | | | | | “CIC_NG7.1”; exon “2”; |
| chr12 | exon | 129207622 | 129227492 | + | gene_id “CIC_NG7”; transcript_id |
| | | | | | “CIC_NG7.1”; exon “3”; |
| chr12 | transcript | 129193358 | 129227492 | + | gene_id “CIC_NG7”; transcript_id |
| | | | | | “CIC_NG7.2”; RPKM “2.4590”; cov |
| | | | | | “33.9676”; |
| chr12 | exon | 129193358 | 129193654 | + | gene_id “CIC_NG7”; transcript_id |
| | | | | | “CIC_NG7.2”; exon “1”; |
| chr12 | exon | 129206945 | 129227492 | + | gene_id “CIC_NG7”; transcript_id |
| | | | | | “CIC_NG7.2”; exon “2”; |
| chr12 | transcript | 129193358 | 129227492 | + | gene_id “CIC_NG7”; transcript_id |
| | | | | | “CIC_NG7.3”; RPKM “3.7403”; cov |
| | | | | | “51.6674”; |
| chr12 | exon | 129193358 | 129193654 | + | gene_id “CIC_NG7”; transcript_id |
| | | | | | “CIC_NG7.3”; exon “1”; |
| chr12 | exon | 129198470 | 129227492 | + | gene_id “CIC_NG7”; transcript_id |
| | | | | | “CIC_NG7.3”; exon “2”; |
| chr21 | transcript | 45609540 | 45624622 | − | gene_id “CIC_NG8”; transcript_id |
| | | | | | “CIC_NG8.1”; RPKM “0.9020”; cov |
| | | | | | “12.4603”; |
| chr21 | exon | 45609540 | 45609637 | − | gene_id “CIC_NG8”; transcript_id |
| | | | | | “CIC_NG8.1”; exon “1”; |
| chr21 | exon | 45620722 | 45624622 | − | gene_id “CIC_NG8”; transcript_id |
| | | | | | “CIC_NG8.1”; exon “2”; |
| chr6 | transcript | 147139695 | 147155171 | − | gene_id “CIC_NG1”; transcript_id |
| | | | | | “CIC_NG1.1”; RPKM “9.6448”; cov |
| | | | | | “133.2322”; |
| chr6 | exon | 147139695 | 147155171 | − | gene_id “CIC_NG1”; transcript_id |
| | | | | | “CIC_NG1.1”; exon “1”; |
| chr8 | transcript | 67090474 | 67090871 | + | gene_id “CIC_NG2”; transcript_id |
| | | | | | “CIC_NG2.1”; RPKM “1.7209”; cov |
| | | | | | “23.7723”; |
| chr8 | exon | 67090474 | 67090871 | + | gene_id “CIC_NG2”; transcript_id |
| | | | | | “CIC_NG2.1”; exon “1”; |
| chr1 | transcript | 1027186 | 1037920 | + | gene_id “DSRCT_NG1”; transcript_id |
| | | | | | “DSRCT_NG1.1”; RPKM “3.8908”; cov |
| | | | | | “53.2383”; |
| chr1 | exon | 1027186 | 1037920 | + | gene_id “DSRCT_NG1”; transcript_id |
| | | | | | “DSRCT_NG1.1”; exon “1”; |
| chr1 | transcript | 189902140 | 189989055 | − | gene_id “DSRCT_NG2”; transcript_id |
| | | | | | “DSRCT_NG2.1”; RPKM “1.7504”; cov |
| | | | | | “23.9510”; |
| chr1 | exon | 189902140 | 189903220 | − | gene_id “DSRCT_NG2”; transcript_id |
| | | | | | “DSRCT_NG2.1”; exon “1”; |
| chr1 | exon | 189904368 | 189904735 | − | gene_id “DSRCT_NG2”; transcript_id |
| | | | | | “DSRCT_NG2.1”; exon “2”; |
| chr1 | exon | 189988920 | 189989055 | − | gene_id “DSRCT_NG2”; transcript_id |
| | | | | | “DSRCT_NG2.1”; exon “3”; |
| chr1 | transcript | 189902140 | 189989055 | − | gene_id “DSRCT_NG2”; transcript_id |
| | | | | | “DSRCT_NG2.2”; RPKM “0.9166”; cov |
| | | | | | “12.5414”; |
| chr1 | exon | 189902140 | 189904735 | − | gene_id “DSRCT_NG2”; transcript_id |
| | | | | | “DSRCT_NG2.2”; exon “1”; |
| chr1 | exon | 189909284 | 189909394 | − | gene_id “DSRCT_NG2”; transcript_id |
| | | | | | “DSRCT_NG2.2”; exon “2”; |
| chr1 | exon | 189910092 | 189910243 | − | gene_id “DSRCT_NG2”; transcript_id |
| | | | | | “DSRCT_NG2.2”; exon “3”; |
| chr1 | exon | 189975471 | 189975575 | − | gene_id “DSRCT_NG2”; transcript_id |
| | | | | | “DSRCT_NG2.2”; exon “4”; |
| chr1 | exon | 189988920 | 189989055 | − | gene_id “DSRCT_NG2”; transcript_id |
| | | | | | “DSRCT_NG2.2”; exon “5”; |
| chr1 | transcript | 189902140 | 189989055 | − | gene_id “DSRCT_NG2”; transcript_id |
| | | | | | “DSRCT_NG2.4”; RPKM “9.5213”; cov |
| | | | | | “130.2815”; |
| chr1 | exon | 189902140 | 189904735 | − | gene_id “DSRCT_NG2”; transcript_id |
| | | | | | “DSRCT_NG2.4”; exon “1”; |
| chr1 | exon | 189909284 | 189909394 | − | gene_id “DSRCT_NG2”; transcript_id |
| | | | | | “DSRCT_NG2.4”; exon “2”; |
| chr1 | exon | 189910092 | 189910243 | − | gene_id “DSRCT_NG2”; transcript_id |
| | | | | | “DSRCT_NG2.4”; exon “3”; |
| chr1 | exon | 189988920 | 189989055 | − | gene_id “DSRCT_NG2”; transcript_id |
| | | | | | “DSRCT_NG2.4”; exon “4”; |
| chr1 | transcript | 189905062 | 189989055 | − | gene_id “DSRCT_NG2”; transcript_id |
| | | | | | “DSRCT_NG2.3”; RPKM “1.2552”; cov |
| | | | | | “17.1751”; |
| chr1 | exon | 189905062 | 189909394 | − | gene_id “DSRCT_NG2”; transcript_id |
| | | | | | “DSRCT_NG2.3”; exon “1”; |
| chr1 | exon | 189910092 | 189910243 | − | gene_id “DSRCT_NG2”; transcript_id |
| | | | | | “DSRCT_NG2.3”; exon “2”; |
| chr1 | exon | 189988920 | 189989055 | − | gene_id “DSRCT_NG2”; transcript_id |
| | | | | | “DSRCT_NG2.3”; exon “3”; |
| chr1 | transcript | 221356206 | 221396611 | + | gene_id “DSRCT_NG3”; transcript_id |
| | | | | | “DSRCT_NG3.1”; RPKM “28.9172”; cov |
| | | | | | “395.6792”; |
| chr1 | exon | 221356206 | 221356337 | + | gene_id “DSRCT_NG3”; transcript_id |
| | | | | | “DSRCT_NG3.1”; exon “1”; |
| chr1 | exon | 221359585 | 221364769 | + | gene_id “DSRCT_NG3”; transcript_id |
| | | | | | “DSRCT_NG3.1”; exon “2”; |
| chr1 | exon | 221365457 | 221365737 | + | gene_id “DSRCT_NG3”; transcript_id |
| | | | | | “DSRCT_NG3.1”; exon “3”; |
| chr1 | exon | 221389466 | 221389738 | + | gene_id “DSRCT_NG3”; transcript_id |
| | | | | | “DSRCT_NG3.1”; exon “4”; |
| chr1 | exon | 221391639 | 221396611 | + | gene_id “DSRCT_NG3”; transcript_id |
| | | | | | “DSRCT_NG3.1”; exon “5”; |
| chr1 | transcript | 221356206 | 221396611 | + | gene_id “DSRCT_NG3”; transcript_id |
| | | | | | “DSRCT_NG3.2”; RPKM “16.0576”; cov |
| | | | | | “219.7189”; |
| chr1 | exon | 221356206 | 221356337 | + | gene_id “DSRCT_NG3”; transcript_id |
| | | | | | “DSRCT_NG3.2”; exon “1”; |
| chr1 | exon | 221359585 | 221364769 | + | gene_id “DSRCT_NG3”; transcript_id |
| | | | | | “DSRCT_NG3.2”; exon “2”; |
| chr1 | exon | 221365457 | 221365737 | + | gene_id “DSRCT_NG3”; transcript_id |
| | | | | | “DSRCT_NG3.2”; exon “3”; |
| chr1 | exon | 221389466 | 221396611 | + | gene_id “DSRCT_NG3”; transcript_id |
| | | | | | “DSRCT_NG3.2”; exon “4”; |
| chr1 | transcript | 231296969 | 231297603 | + | gene_id “DSRCT_NG4”; transcript_id |
| | | | | | “DSRCT_NG4.1”; RPKM “5.4594”; cov |
| | | | | | “74.7023”; |
| chr1 | exon | 231296969 | 231297603 | + | gene_id “DSRCT_NG4”; transcript_id |
| | | | | | “DSRCT_NG4.1”; exon “1”; |
| chr10 | transcript | 3318786 | 3320209 | − | gene_id “DSRCT_NG23”; transcript_id |
| | | | | | “DSRCT_NG23.1”; RPKM “1.6156”; cov |
| | | | | | “22.1066”; |
| chr10 | exon | 3318786 | 3320209 | − | gene_id “DSRCT_NG23”; transcript_id |
| | | | | | “DSRCT_NG23.1”; exon “1”; |
| chr10 | transcript | 3328726 | 3338019 | − | gene_id “DSRCT_NG24”; transcript_id |
| | | | | | “DSRCT_NG24.1”; RPKM “7.3306”; cov |
| | | | | | “100.3057”; |
| chr10 | exon | 3328726 | 3329780 | − | gene_id “DSRCT_NG24”; transcript_id |
| | | | | | “DSRCT_NG24.1”; exon “1”; |
| chr10 | exon | 3337014 | 3338019 | − | gene_id “DSRCT_NG24”; transcript_id |
| | | | | | “DSRCT_NG24.1”; exon “2”; |
| chr10 | transcript | 3328726 | 3338019 | − | gene_id “DSRCT_NG24”; transcript_id |
| | | | | | “DSRCT_NG24.2”; RPKM “18.6396”; |
| | | | | | cov “255.0492”; |
| chr10 | exon | 3328726 | 3338019 | − | gene_id “DSRCT_NG24”; transcript_id |
| | | | | | “DSRCT_NG24.2”; exon “1”; |
| chr10 | transcript | 3328726 | 3338019 | − | gene_id “DSRCT_NG24”; transcript_id |
| | | | | | “DSRCT_NG24.3”; RPKM “4.4747”; cov |
| | | | | | “61.2285”; |
| chr10 | exon | 3328726 | 3329780 | − | gene_id “DSRCT_NG24”; transcript_id |
| | | | | | “DSRCT_NG24.3”; exon “1”; |
| chr10 | exon | 3330392 | 3338019 | − | gene_id “DSRCT_NG24”; transcript_id |
| | | | | | “DSRCT_NG24.3”; exon “2”; |
| chr11 | transcript | 1371528 | 1388488 | + | gene_id “DSRCT_NG25”; transcript_id |
| | | | | | “DSRCT_NG25.1”; RPKM “2.5051”; cov |
| | | | | | “34.2780”; |
| chr11 | exon | 1371528 | 1371992 | + | gene_id “DSRCT_NG25”; transcript_id |
| | | | | | “DSRCT_NG25.1”; exon “1”; |
| chr11 | exon | 1381945 | 1387003 | + | gene_id “DSRCT_NG25”; transcript_id |
| | | | | | “DSRCT_NG25.1”; exon “2”; |
| chr11 | exon | 1387332 | 1388488 | + | gene_id “DSRCT_NG25”; transcript_id |
| | | | | | “DSRCT_NG25.1”; exon “3”; |
| chr11 | transcript | 1371528 | 1388488 | + | gene_id “DSRCT_NG25”; transcript_id |
| | | | | | “DSRCT_NG25.2”; RPKM “2.6761”; cov |
| | | | | | “36.6182”; |
| chr11 | exon | 1371528 | 1371992 | + | gene_id “DSRCT_NG25”; transcript_id |
| | | | | | “DSRCT_NG25.2”; exon “1”; |
| chr11 | exon | 1381945 | 1388488 | + | gene_id “DSRCT_NG25”; transcript_id |
| | | | | | “DSRCT_NG25.2”; exon “2”; |
| chr11 | transcript | 68435596 | 68438308 | − | gene_id “DSRCT_NG26”; transcript_id |
| | | | | | “DSRCT_NG26.1”; RPKM “0.7566”; cov |
| | | | | | “10.3533”; |
| chr11 | exon | 68435596 | 68436309 | − | gene_id “DSRCT_NG26”; transcript_id |
| | | | | | “DSRCTJMG26.1”; exon “1”; |
| chr11 | exon | 68436644 | 68436839 | − | gene_id “DSRCT_NG26”; transcript_id |
| | | | | | “DSRCT_NG26.1”; exon “2”; |
| chr11 | exon | 68437321 | 68437374 | − | gene_id “DSRCT_NG26”; transcript_id |
| | | | | | “DSRCT_NG26.1”; exon “3”; |
| chr11 | exon | 68437481 | 68438308 | − | gene_id “DSRCT_NG26”; transcript_id |
| | | | | | “DSRCT_NG26.1”; exon “4”; |
| chr11 | transcript | 68435596 | 68438308 | − | gene_id “DSRCT_NG26”; transcript_id |
| | | | | | “DSRCT_NG26.2”; RPKM “2.0863”; cov |
| | | | | | “28.5468”; |
| chr11 | exon | 68435596 | 68436309 | − | gene_id “DSRCT_NG26”; transcript_id |
| | | | | | “DSRCT_NG26.2”; exon “1”; |
| chr11 | exon | 68436644 | 68436839 | − | gene_id “DSRCT_NG26”; transcript_id |
| | | | | | “DSRCT_NG26.2”; exon “2”; |
| chr11 | exon | 68437321 | 68438308 | − | gene_id “DSRCT_NG26”; transcript_id |
| | | | | | “DSRCT_NG26.2”; exon “3”; |
| chr11 | transcript | 68435596 | 68438308 | − | gene_id “DSRCT_NG26”; transcript_id |
| | | | | | “DSRCT_NG26.3”; RPKM “2.7082”; cov |
| | | | | | “37.0574”; |
| chr11 | exon | 68435596 | 68436309 | − | gene_id “DSRCT_NG26”; transcript_id |
| | | | | | “DSRCT_NG26.3”; exon “1”; |
| chr11 | exon | 68436644 | 68438308 | − | gene_id “DSRCT_NG26”; transcript_id |
| | | | | | “DSRCT_NG26.3”; exon “2”; |
| chr11 | transcript | 68435596 | 68438308 | − | gene_id “DSRCT_NG26”; transcript_id |
| | | | | | “DSRCT_NG26.4”; RPKM “2.6560”; cov |
| | | | | | “36.3418”; |
| chr11 | exon | 68435596 | 68438308 | − | gene_id “DSRCT_NG26”; transcript_id |
| | | | | | “DSRCT_NG26.4”; exon “1”; |
| chr15 | transcript | 98227047 | 98233708 | + | gene_id “DSRCT_NG27”; transcript_id |
| | | | | | “DSRCT_NG27.1”; RPKM “0.8123”; cov |
| | | | | | “11.1145”; |
| chr15 | exon | 98227047 | 98227171 | + | gene_id “DSRCT_NG27”; transcript_id |
| | | | | | “DSRCT_NG27.1”; exon “1”; |
| chr15 | exon | 98233077 | 98233708 | + | gene_id “DSRCT_NG27”; transcript_id |
| | | | | | “DSRCT_NG27.1”; exon “2”; |
| chr15 | transcript | 98227047 | 98233708 | + | gene_id “DSRCT_NG27”; transcript_id |
| | | | | | “DSRCT_NG27.2”; RPKM “0.7749”; cov |
| | | | | | “10.6032”; |
| chr15 | exon | 98227047 | 98227171 | + | gene_id “DSRCT_NG27”; transcript_id |
| | | | | | “DSRCT_NG27.2”; exon “1”; |
| chr15 | exon | 98233072 | 98233708 | + | gene_id “DSRCT_NG27”; transcript_id |
| | | | | | “DSRCT_NG27.2”; exon “2”; |
| chr15 | transcript | 98227047 | 98233708 | + | gene_id “DSRCT_NG27”; transcript_id |
| | | | | | “DSRCT_NG27.3”; RPKM “24.7998”; |
| | | | | | cov “339.3390”; |
| chr15 | exon | 98227047 | 98227171 | + | gene_id “DSRCT_NG27”; transcript_id |
| | | | | | “DSRCT_NG27.3”; exon “1”; |
| chr15 | exon | 98232944 | 98233708 | + | gene_id “DSRCT_NG27”; transcript_id |
| | | | | | “DSRCT_NG27.3”; exon “2”; |
| chr16 | transcript | 86149446 | 86154409 | − | gene_id “DSRCT_NG28”; transcript_id |
| | | | | | “DSRCT_NG28.1”; RPKM “1.9972”; cov |
| | | | | | “27.3286”; |
| chr16 | exon | 86149446 | 86154409 | − | gene_id “DSRCT_NG28”; transcript_id |
| | | | | | “DSRCT_NG28.1”; exon “1”; |
| chr16 | transcript | 86149446 | 86156729 | − | gene_id “DSRCT_NG28”; transcript_id |
| | | | | | “DSRCT_NG28.2”; RPKM “1.5067”; cov |
| | | | | | “20.6168”; |
| chr16 | exon | 86149446 | 86151884 | − | gene_id “DSRCT_NG28”; transcript_id |
| | | | | | “DSRCT_NG28.2”; exon “1”; |
| chr16 | exon | 86155828 | 86156729 | − | gene_id “DSRCT_NG28”; transcript_id |
| | | | | | “DSRCT_NG28.2”; exon “2”; |
| chr16 | transcript | 86151184 | 86163138 | + | gene_id “DSRCT_NG29”; transcript_id |
| | | | | | “DSRCT_NG29.1”; RPKM “0.7455”; cov |
| | | | | | “10.2011”; |
| chr16 | exon | 86151184 | 86151602 | + | gene_id “DSRCT_NG29”; transcript_id |
| | | | | | “DSRCT_NG29.1”; exon “1”; |
| chr16 | exon | 86155402 | 86155431 | + | gene_id “DSRCT_NG29”; transcript_id |
| | | | | | “DSRCT_NG29.1”; exon “2”; |
| chr16 | exon | 86155547 | 86163138 | + | gene_id “DSRCT_NG29”; transcript_id |
| | | | | | “DSRCT_NG29.1”; exon “3”; |
| chr19 | transcript | 1697219 | 1744600 | − | gene_id “DSRCT_NG30”; transcript_id |
| | | | | | “DSRCT_NG30.15”; RPKM “3.5576”; |
| | | | | | cov “48.6786”; |
| chr19 | exon | 1697219 | 1706398 | − | gene_id “DSRCT_NG30”; transcript_id |
| | | | | | “DSRCT_NG30.15”; exon “1”; |
| chr19 | exon | 1707363 | 1707460 | − | gene_id “DSRCT_NG30”; transcript_id |
| | | | | | “DSRCT_NG30.15”; exon “2”; |
| chr19 | exon | 1708336 | 1708505 | − | gene_id “DSRCT_NG30”; transcript_id |
| | | | | | “DSRCT_NG30.15”; exon “3”; |
| chr19 | exon | 1738954 | 1739048 | − | gene_id “DSRCT_NG30”; transcript_id |
| | | | | | “DSRCT_NG30.15”; exon “4”; |
| chr19 | exon | 1744334 | 1744600 | − | gene_id “DSRCT_NG30”; transcript_id |
| | | | | | “DSRCT_NG30.15”; exon “5”; |
| chr19 | transcript | 1697219 | 1744600 | − | gene_id “DSRCT_NG30”; transcript_id |
| | | | | | “DSRCT_NG30.14”; RPKM “4.6634”; |
| | | | | | cov “63.8098”; |
| chr19 | exon | 1697219 | 1697386 | − | gene_id “DSRCT_NG30”; transcript_id |
| | | | | | “DSRCT_NG30.14”; exon “1”; |
| chr19 | exon | 1698169 | 1706398 | − | gene_id “DSRCT_NG30”; transcript_id |
| | | | | | “DSRCT_NG30.14”; exon “2”; |
| chr19 | exon | 1707363 | 1707460 | − | gene_id “DSRCT_NG30”; transcript_id |
| | | | | | “DSRCT_NG30.14”; exon “3”; |
| chr19 | exon | 1708336 | 1708505 | − | gene_id “DSRCT_NG30”; transcript_id |
| | | | | | “DSRCT_NG30.14”; exon “4”; |
| chr19 | exon | 1738954 | 1739048 | − | gene_id “DSRCT_NG30”; transcript_id |
| | | | | | “DSRCT_NG30.14”; exon “5”; |
| chr19 | exon | 1744334 | 1744600 | − | gene_id “DSRCT_NG30”; transcript_id |
| | | | | | “DSRCT_NG30.14”; exon “6”; |
| chr19 | transcript | 1725870 | 1727366 | − | gene_id “DSRCT_NG30”; transcript_id |
| | | | | | “DSRCT_NG30.1”; RPKM “2.7999”; cov |
| | | | | | “38.3120”; |
| chr19 | exon | 1725870 | 1727366 | − | gene_id “DSRCT_NG30”; transcript_id |
| | | | | | “DSRCT_NG30.1”; exon “1”; |
| chr19 | transcript | 1725870 | 1744600 | − | gene_id “DSRCT_NG30”; transcript_id |
| | | | | | “DSRCT_NG30.10”; RPKM “1.0972”; |
| | | | | | cov “15.0133”; |
| chr19 | exon | 1725870 | 1726170 | − | gene_id “DSRCT_NG30”; transcript_id |
| | | | | | “DSRCT_NG30.10”; exon “1”; |
| chr19 | exon | 1738954 | 1739048 | − | gene_id “DSRCT_NG30”; transcript_id |
| | | | | | “DSRCT_NG30.10”; exon “2”; |
| chr19 | exon | 1740185 | 1740327 | − | gene_id “DSRCT_NG30”; transcript_id |
| | | | | | “DSRCT_NG30.10”; exon “3”; |
| chr19 | exon | 1744334 | 1744600 | − | gene_id “DSRCT_NG30”; transcript_id |
| | | | | | “DSRCT_NG30.10”; exon “4”; |
| chr19 | transcript | 1733413 | 1744600 | − | gene_id “DSRCT_NG30”; transcript_id |
| | | | | | “DSRCT_NG30.4”; RPKM “1.7305”; cov |
| | | | | | “23.6791”; |
| chr19 | exon | 1733413 | 1737515 | − | gene_id “DSRCT_NG30”; transcript_id |
| | | | | | “DSRCT_NG30.4”; exon “1”; |
| chr19 | exon | 1738954 | 1739048 | − | gene_id “DSRCT_NG30”; transcript_id |
| | | | | | “DSRCT_NG30.4”; exon “2”; |
| chr19 | exon | 1744334 | 1744600 | − | gene_id “DSRCT_NG30”; transcript_id |
| | | | | | “DSRCT_NG30.4”; exon “3”; |
| chr19 | transcript | 1733413 | 1744600 | − | gene_id “DSRCT_NG30”; transcript_id |
| | | | | | “DSRCT_NG30.5”; RPKM “1.4668”; cov |
| | | | | | “20.0707”; |
| chr19 | exon | 1733413 | 1739048 | − | gene_id “DSRCT_NG30”; transcript_id |
| | | | | | “DSRCT_NG30.5”; exon “1”; |
| chr19 | exon | 1740177 | 1740327 | − | gene_id “DSRCT_NG30”; transcript_id |
| | | | | | “DSRCT_NG30.5”; exon “2”; |
| chr19 | exon | 1744334 | 1744600 | − | gene_id “DSRCT_NG30”; transcript_id |
| | | | | | “DSRCT_NG30.5”; exon “3”; |
| chr19 | transcript | 1733413 | 1744600 | − | gene_id “DSRCT_NG30”; transcript_id |
| | | | | | “DSRCT_NG30.6”; RPKM “1.2835”; cov |
| | | | | | “17.5619”; |
| chr19 | exon | 1733413 | 1736229 | − | gene_id “DSRCT_NG30”; transcript_id |
| | | | | | “DSRCT_NG30.6”; exon “1”; |
| chr19 | exon | 1738954 | 1739048 | − | gene_id “DSRCT_NG30”; transcript_id |
| | | | | | “DSRCT_NG30.6”; exon “2”; |
| chr19 | exon | 1740177 | 1740327 | − | gene_id “DSRCT_NG30”; transcript_id |
| | | | | | “DSRCT_NG30.6”; exon “3”; |
| chr19 | exon | 1744334 | 1744600 | − | gene_id “DSRCT_NG30”; transcript_id |
| | | | | | “DSRCT_NG30.6”; exon “4”; |
| chr19 | transcript | 1733413 | 1744600 | − | gene_id “DSRCT_NG30”; transcript_id |
| | | | | | “DSRCT_NG30.7”; RPKM “1.7106”; cov |
| | | | | | “23.4064”; |
| chr19 | exon | 1733413 | 1737515 | − | gene_id “DSRCT_NG30”; transcript_id |
| | | | | | “DSRCT_NG30.7”; exon “1”; |
| chr19 | exon | 1738954 | 1739048 | − | gene_id “DSRCT_NG30”; transcript_id |
| | | | | | “DSRCT_NG30.7”; exon “2”; |
| chr19 | exon | 1740177 | 1740327 | − | gene_id “DSRCT_NG30”; transcript_id |
| | | | | | “DSRCT_NG30.7”; exon “3”; |
| chr19 | exon | 1744334 | 1744600 | − | gene_id “DSRCT_NG30”; transcript_id |
| | | | | | “DSRCT_NG30.7”; exon “4”; |
| chr19 | transcript | 1733413 | 1744600 | − | gene_id “DSRCT_NG30”; transcript_id |
| | | | | | “DSRCT_NG30.13”; RPKM “7.0674”; |
| | | | | | cov “96.7040”; |
| chr19 | exon | 1733413 | 1737515 | − | gene_id “DSRCT_NG30”; transcript_id |
| | | | | | “DSRCT_NG30.13”; exon “1”; |
| chr19 | exon | 1738954 | 1739048 | − | gene_id “DSRCT_NG30”; transcript_id |
| | | | | | “DSRCT_NG30.13”; exon “2”; |
| chr19 | exon | 1740185 | 1740327 | − | gene_id “DSRCT_NG30”; transcript_id |
| | | | | | “DSRCT_NG30.13”; exon “3”; |
| chr19 | exon | 1744334 | 1744600 | − | gene_id “DSRCT_NG30”; transcript_id |
| | | | | | “DSRCT_NG30.13”; exon “4”; |
| chr19 | transcript | 1733413 | 1744600 | − | gene_id “DSRCT_NG30”; transcript_id |
| | | | | | “DSRCT_NG30.12”; RPKM “1.0329”; |
| | | | | | cov “14.1336”; |
| chr19 | exon | 1733413 | 1737515 | − | gene_id “DSRCT_NG30”; transcript_id |
| | | | | | “DSRCT_NG30.12”; exon “1”; |
| chr19 | exon | 1738954 | 1739048 | − | gene_id “DSRCT_NG30”; transcript_id |
| | | | | | “DSRCT_NG30.12”; exon “2”; |
| chr19 | exon | 1740185 | 1740327 | − | gene_id “DSRCT_NG30”; transcript_id |
| | | | | | “DSRCT_NG30.12”; exon “3”; |
| chr19 | exon | 1743263 | 1744600 | − | gene_id “DSRCT_NG30”; transcript_id |
| | | | | | “DSRCT_NG30.12”; exon “4”; |
| chr19 | transcript | 1733413 | 1744600 | − | gene_id “DSRCT_NG30”; transcript_id |
| | | | | | “DSRCT_NG30.11”; RPKM “3.1202”; |
| | | | | | cov “42.6940”; |
| chr19 | exon | 1733413 | 1739048 | − | gene_id “DSRCT_NG30”; transcript_id |
| | | | | | “DSRCT_NG30.11”; exon “1”; |
| chr19 | exon | 1740185 | 1740327 | − | gene_id “DSRCT_NG30”; transcript_id |
| | | | | | “DSRCT_NG30.11”; exon “2”; |
| chr19 | exon | 1744334 | 1744600 | − | gene_id “DSRCT_NG30”; transcript_id |
| | | | | | “DSRCT_NG30.11”; exon “3”; |
| chr19 | transcript | 1733413 | 1744600 | − | gene_id “DSRCT_NG30”; transcript_id |
| | | | | | “DSRCT_NG30.3”; RPKM “1.9927”; cov |
| | | | | | “27.2660”; |
| chr19 | exon | 1733413 | 1736229 | − | gene_id “DSRCT_NG30”; transcript_id |
| | | | | | “DSRCT_NG30.3”; exon “1”; |
| chr19 | exon | 1738954 | 1739048 | − | gene_id “DSRCT_NG30”; transcript_id |
| | | | | | “DSRCT_NG30.3”; exon “2”; |
| chr19 | exon | 1744334 | 1744600 | − | gene_id “DSRCT_NG30”; transcript_id |
| | | | | | “DSRCT_NG30.3”; exon “3”; |
| chr19 | transcript | 1733413 | 1744600 | − | gene_id “DSRCT_NG30”; transcript_id |
| | | | | | “DSRCT_NG30.2”; RPKM “1.2488”; cov |
| | | | | | “17.0879”; |
| chr19 | exon | 1733413 | 1739048 | − | gene_id “DSRCT_NG30”; transcript_id |
| | | | | | “DSRCT_NG30.2”; exon “1”; |
| chr19 | exon | 1744334 | 1744600 | − | gene_id “DSRCT_NG30”; transcript_id |
| | | | | | “DSRCT_NG30.2”; exon “2”; |
| chr19 | transcript | 1733413 | 1744600 | − | gene_id “DSRCT_NG30”; transcript_id |
| | | | | | “DSRCT_NG30.9”; RPKM “3.4540”; cov |
| | | | | | “47.2619”; |
| chr19 | exon | 1733413 | 1736229 | − | gene_id “DSRCT_NG30”; transcript_id |
| | | | | | “DSRCT_NG30.9”; exon “1”; |
| chr19 | exon | 1738954 | 1739048 | − | gene_id “DSRCT_NG30”; transcript_id |
| | | | | | “DSRCT_NG30.9”; exon “2”; |
| chr19 | exon | 1740185 | 1740327 | − | gene_id “DSRCT_NG30”; transcript_id |
| | | | | | “DSRCT_NG30.9”; exon “3”; |
| chr19 | exon | 1744334 | 1744600 | − | gene_id “DSRCT_NG30”; transcript_id |
| | | | | | “DSRCT_NG30.9”; exon “4”; |
| chr19 | transcript | 1744745 | 1745892 | − | gene_id “DSRCT_NG30”; transcript_id |
| | | | | | “DSRCT_NG30.8”; RPKM “0.8496”; cov |
| | | | | | “11.6254”; |
| chr19 | exon | 1744745 | 1744941 | − | gene_id “DSRCT_NG30”; transcript_id |
| | | | | | “DSRCT_NG30.8”; exon “1”; |
| chr19 | exon | 1745206 | 1745309 | − | gene_id “DSRCT_NG30”; transcript_id |
| | | | | | “DSRCT_NG30.8”; exon “2”; |
| chr19 | exon | 1745707 | 1745892 | − | gene_id “DSRCT_NG30”; transcript_id |
| | | | | | “DSRCT_NG30.8”; exon “3”; |
| chr19 | transcript | 1524034 | 1528426 | − | gene_id “DSRCT_NG31”; transcript_id |
| | | | | | “DSRCT_NG31.1”; RPKM “25.2127”; |
| | | | | | cov “344.9894”; |
| chr19 | exon | 1524034 | 1528426 | − | gene_id “DSRCT_NG31”; transcript_id |
| | | | | | “DSRCT_NG31.1”; exon “1”; |
| chr2 | transcript | 74791316 | 74837588 | + | gene_id “DSRCT_NG5”; transcript_id |
| | | | | | “DSRCT_NG5.1”; RPKM “0.7311”; cov |
| | | | | | “10.0042”; |
| chr2 | exon | 74791316 | 74791490 | + | gene_id “DSRCT_NG5”; transcript_id |
| | | | | | “DSRCT_NG5.1”; exon “1”; |
| chr2 | exon | 74837320 | 74837588 | + | gene_id “DSRCT_NG5”; transcript_id |
| | | | | | “DSRCT_NG5.1”; exon “2”; |
| chr2 | transcript | 103978490 | 104042949 | + | gene_id “DSRCT_NG6”; transcript_id |
| | | | | | “DSRCT_NG6.7”; RPKM “0.7836”; cov |
| | | | | | “10.7224”; |
| chr2 | exon | 103978490 | 103979070 | + | gene_id “DSRCT_NG6”; transcript_id |
| | | | | | “DSRCT_NG6.7”; exon “1”; |
| chr2 | exon | 104019436 | 104019546 | + | gene_id “DSRCT_NG6”; transcript_id |
| | | | | | “DSRCT_NG6.7”; exon “2”; |
| chr2 | exon | 104021412 | 104021484 | + | gene_id “DSRCT_NG6”; transcript_id |
| | | | | | “DSRCT_NG6.7”; exon “3”; |
| chr2 | exon | 104026652 | 104042949 | + | gene_id “DSRCT_NG6”; transcript_id |
| | | | | | “DSRCT_NG6.7”; exon “4”; |
| chr2 | transcript | 103978490 | 104042949 | + | gene_id “DSRCT_NG6”; transcript_id |
| | | | | | “DSRCT_NG6.6”; RPKM “0.8644”; cov |
| | | | | | “11.8277”; |
| chr2 | exon | 103978490 | 103979070 | + | gene_id “DSRCT_NG6”; transcript_id |
| | | | | | “DSRCT_NG6.6”; exon “1”; |
| chr2 | exon | 104019431 | 104019546 | + | gene_id “DSRCT_NG6”; transcript_id |
| | | | | | “DSRCT_NG6.6”; exon “2”; |
| chr2 | exon | 104021412 | 104021484 | + | gene_id “DSRCT_NG6”; transcript_id |
| | | | | | “DSRCT_NG6.6”; exon “3”; |
| chr2 | exon | 104027078 | 104042949 | + | gene_id “DSRCT_NG6”; transcript_id |
| | | | | | “DSRCT_NG6.6”; exon “4”; |
| chr2 | transcript | 103978490 | 104042949 | + | gene_id “DSRCT_NG6”; transcript_id |
| | | | | | “DSRCT_NG6.5”; RPKM “8.5436”; cov |
| | | | | | “116.9036”; |
| chr2 | exon | 103978490 | 103979070 | + | gene_id “DSRCT_NG6”; transcript_id |
| | | | | | “DSRCT_NG6.5”; exon “1”; |
| chr2 | exon | 103995841 | 103995896 | + | gene_id “DSRCT_NG6”; transcript_id |
| | | | | | “DSRCT_NG6.5”; exon “2”; |
| chr2 | exon | 104019436 | 104019546 | + | gene_id “DSRCT_NG6”; transcript_id |
| | | | | | “DSRCT_NG6.5”; exon “3”; |
| chr2 | exon | 104021412 | 104042949 | + | gene_id “DSRCT_NG6”; transcript_id |
| | | | | | “DSRCT_NG6.5”; exon “4”; |
| chr2 | transcript | 103978490 | 104042949 | + | gene_id “DSRCT_NG6”; transcript_id |
| | | | | | “DSRCT_NG6.4”; RPKM “9.5843”; cov |
| | | | | | “131.1431”; |
| chr2 | exon | 103978490 | 103979070 | + | gene_id “DSRCT_NG6”; transcript_id |
| | | | | | “DSRCT_NG6.4”; exon “1”; |
| chr2 | exon | 103995841 | 103995896 | + | gene_id “DSRCT_NG6”; transcript_id |
| | | | | | “DSRCT_NG6.4”; exon “2”; |
| chr2 | exon | 104019436 | 104019546 | + | gene_id “DSRCT_NG6”; transcript_id |
| | | | | | “DSRCT_NG6.4”; exon “3”; |
| chr2 | exon | 104021412 | 104021484 | + | gene_id “DSRCT_NG6”; transcript_id |
| | | | | | “DSRCT_NG6.4”; exon “4”; |
| chr2 | exon | 104027078 | 104042949 | + | gene_id “DSRCT_NG6”; transcript_id |
| | | | | | “DSRCT_NG6.4”; exon “5”; |
| chr2 | transcript | 103978490 | 104042949 | + | gene_id “DSRCT_NG6”; transcript_id |
| | | | | | “DSRCT_NG6.3”; RPKM “3.0324”; cov |
| | | | | | “41.4926”; |
| chr2 | exon | 103978490 | 103979070 | + | gene_id “DSRCT_NG6”; transcript_id |
| | | | | | “DSRCT_NG6.3”; exon “1”; |
| chr2 | exon | 104019436 | 104019546 | + | gene_id “DSRCT_NG6”; transcript_id |
| | | | | | “DSRCT_NG6.3”; exon “2”; |
| chr2 | exon | 104021412 | 104021484 | + | gene_id “DSRCT_NG6”; transcript_id |
| | | | | | “DSRCT_NG6.3”; exon “3”; |
| chr2 | exon | 104027078 | 104042949 | + | gene_id “DSRCT_NG6”; transcript_id |
| | | | | | “DSRCT_NG6.3”; exon “4”; |
| chr2 | transcript | 103978490 | 104042949 | + | gene_id “DSRCT_NG6”; transcript_id |
| | | | | | “DSRCT_NG6.2”; RPKM “1.2526”; cov |
| | | | | | “17.1401”; |
| chr2 | exon | 103978490 | 103979070 | + | gene_id “DSRCT_NG6”; transcript_id |
| | | | | | “DSRCT_NG6.2”; exon “1”; |
| chr2 | exon | 104019436 | 104019546 | + | gene_id “DSRCT_NG6”; transcript_id |
| | | | | | “DSRCT_NG6.2”; exon “2”; |
| chr2 | exon | 104021412 | 104021484 | + | gene_id “DSRCT_NG6”; transcript_id |
| | | | | | “DSRCT_NG6.2”; exon “3”; |
| chr2 | exon | 104026297 | 104042949 | + | gene_id “DSRCT_NG6”; transcript_id |
| | | | | | “DSRCT_NG6.2”; exon “4”; |
| chr2 | transcript | 103978490 | 104042949 | + | gene_id “DSRCT_NG6”; transcript_id |
| | | | | | “DSRCT_NG6.1”; RPKM “0.8806”; cov |
| | | | | | “12.0494”; |
| chr2 | exon | 103978490 | 103979070 | + | gene_id “DSRCT_NG6”; transcript_id |
| | | | | | “DSRCT_NG6.1”; exon “1”; |
| chr2 | exon | 103995841 | 103995896 | + | gene_id “DSRCT_NG6”; transcript_id |
| | | | | | “DSRCT_NG6.1”; exon “2”; |
| chr2 | exon | 104019436 | 104042949 | + | gene_id “DSRCT_NG6”; transcript_id |
| | | | | | “DSRCT_NG6.1”; exon “3”; |
| chr2 | transcript | 119808116 | 119810916 | + | gene_id “DSRCT_NG7”; transcript_id |
| | | | | | “DSRCT_NG7.1”; RPKM “1.7067”; cov |
| | | | | | “23.3530”; |
| chr2 | exon | 119808116 | 119808455 | + | gene_id “DSRCT_NG7”; transcript_id |
| | | | | | “DSRCT_NG7.1”; exon “1”; |
| chr2 | exon | 119808654 | 119810916 | + | gene_id “DSRCT_NG7”; transcript_id |
| | | | | | “DSRCT_NG7.1”; exon “2”; |
| chr2 | transcript | 119808116 | 119810916 | + | gene_id “DSRCT_NG7”; transcript_id |
| | | | | | “DSRCT_NG7.2”; RPKM “1.6632”; cov |
| | | | | | “22.7584”; |
| chr2 | exon | 119808116 | 119808455 | + | gene_id “DSRCT_NG7”; transcript_id |
| | | | | | “DSRCT_NG7.2”; exon “1”; |
| chr2 | exon | 119808591 | 119810916 | + | gene_id “DSRCT_NG7”; transcript_id |
| | | | | | “DSRCT_NG7.2”; exon “2”; |
| chr2 | transcript | 119808116 | 119819342 | + | gene_id “DSRCT_NG7”; transcript_id |
| | | | | | “DSRCT_NG7.3”; RPKM “0.7416”; cov |
| | | | | | “10.1472”; |
| chr2 | exon | 119808116 | 119808455 | + | gene_id “DSRCT_NG7”; transcript_id |
| | | | | | “DSRCT_NG7.3”; exon “1”; |
| chr2 | exon | 119818971 | 119819342 | + | gene_id “DSRCT_NG7”; transcript_id |
| | | | | | “DSRCT_NG7.3”; exon “2”; |
| chr2 | transcript | 119808116 | 119821530 | + | gene_id “DSRCT_NG7”; transcript_id |
| | | | | | “DSRCT_NG7.4”; RPKM “1.0583”; cov |
| | | | | | “14.4808”; |
| chr2 | exon | 119808116 | 119808455 | + | gene_id “DSRCT_NG7”; transcript_id |
| | | | | | “DSRCT_NG7.4”; exon “1”; |
| chr2 | exon | 119818971 | 119819088 | + | gene_id “DSRCT_NG7”; transcript_id |
| | | | | | “DSRCT_NG7.4”; exon “2”; |
| chr2 | exon | 119821417 | 119821530 | + | gene_id “DSRCT_NG7”; transcript_id |
| | | | | | “DSRCT_NG7.4”; exon “3”; |
| chr2 | transcript | 233225399 | 233232735 | − | gene_id “DSRCT_NG8”; transcript_id |
| | | | | | “DSRCT_NG8.2”; RPKM “0.7340”; cov |
| | | | | | “10.0430”; |
| chr2 | exon | 233225399 | 233229389 | − | gene_id “DSRCT_NG8”; transcript_id |
| | | | | | “DSRCT_NG8.2”; exon “1”; |
| chr2 | exon | 233230020 | 233232735 | − | gene_id “DSRCT_NG8”; transcript_id |
| | | | | | “DSRCT_NG8.2”; exon “2”; |
| chr2 | transcript | 233225399 | 233232735 | − | gene_id “DSRCT_NG8”; transcript_id |
| | | | | | “DSRCT_NG8.3”; RPKM “4.9522”; cov |
| | | | | | “67.7611”; |
| chr2 | exon | 233225399 | 233227395 | − | gene_id “DSRCT_NG8”; transcript_id |
| | | | | | “DSRCT_NG8.3”; exon “1”; |
| chr2 | exon | 233229150 | 233229389 | − | gene_id “DSRCT_NG8”; transcript_id |
| | | | | | “DSRCT_NG8.3”; exon “2”; |
| chr2 | exon | 233230831 | 233232735 | − | gene_id “DSRCT_NG8”; transcript_id |
| | | | | | “DSRCT_NG8.3”; exon “3”; |
| chr2 | transcript | 233225399 | 233232735 | − | gene_id “DSRCT_NG8”; transcript_id |
| | | | | | “DSRCT_NG8.4”; RPKM “1.6400”; cov |
| | | | | | “22.4397”; |
| chr2 | exon | 233225399 | 233229389 | − | gene_id “DSRCT_NG8”; transcript_id |
| | | | | | “DSRCT_NG8.4”; exon “1”; |
| chr2 | exon | 233230831 | 233232735 | − | gene_id “DSRCT_NG8”; transcript_id |
| | | | | | “DSRCT_NG8.4”; exon “2”; |
| chr2 | transcript | 233225399 | 233232735 | − | gene_id “DSRCT_NG8”; transcript_id |
| | | | | | “DSRCT_NG8.1”; RPKM “1.7049”; cov |
| | | | | | “23.3277”; |
| chr2 | exon | 233225399 | 233232735 | − | gene_id “DSRCT_NG8”; transcript_id |
| | | | | | “DSRCT_NG8.1”; exon “1”; |
| chr21 | transcript | 46468246 | 46478349 | − | gene_id “DSRCT_NG32”; transcript_id |
| | | | | | “DSRCT_NG32.1”; RPKM “1.7334”; cov |
| | | | | | “23.7189”; |
| chr21 | exon | 46468246 | 46469914 | − | gene_id “DSRCT_NG32”; transcript_id |
| | | | | | “DSRCT_NG32.1”; exon “1”; |
| chr21 | exon | 46478093 | 46478349 | − | gene_id “DSRCT_NG32”; transcript_id |
| | | | | | “DSRCT_NG32.1”; exon “2”; |
| chr21 | transcript | 46468246 | 46478349 | − | gene_id “DSRCT_NG32”; transcript_id |
| | | | | | “DSRCT_NG32.2”; RPKM “0.9838”; cov |
| | | | | | “13.4609”; |
| chr21 | exon | 46468246 | 46473906 | − | gene_id “DSRCT_NG32”; transcript_id |
| | | | | | “DSRCT_NG32.2”; exon “1”; |
| chr21 | exon | 46473932 | 46478349 | − | gene_id “DSRCT_NG32”; transcript_id |
| | | | | | “DSRCT_NG32.2”; exon “2”; |
| chr21 | transcript | 46468246 | 46478349 | − | gene_id “DSRCT_NG32”; transcript_id |
| | | | | | “DSRCT_NG32.3”; RPKM “1.6527”; cov |
| | | | | | “22.6142”; |
| chr21 | exon | 46468246 | 46478349 | − | gene_id “DSRCT_NG32”; transcript_id |
| | | | | | “DSRCT_NG32.3”; exon “1”; |
| chr22 | transcript | 34996069 | 35029990 | − | gene_id “DSRCT_NG33”; transcript_id |
| | | | | | “DSRCT_NG33.3”; RPKM “10.2084”; |
| | | | | | cov “139.6836”; |
| chr22 | exon | 34996069 | 35009698 | − | gene_id “DSRCT_NG33”; transcript_id |
| | | | | | “DSRCT_NG33.3”; exon “1”; |
| chr22 | exon | 35022242 | 35025264 | − | gene_id “DSRCT_NG33”; transcript_id |
| | | | | | “DSRCT_NG33.3”; exon “2”; |
| chr22 | exon | 35029343 | 35029990 | − | gene_id “DSRCT_NG33”; transcript_id |
| | | | | | “DSRCT_NG33.3”; exon “3”; |
| chr22 | transcript | 34996069 | 35029990 | − | gene_id “DSRCT_NG33”; transcript_id |
| | | | | | “DSRCT_NG33.4”; RPKM “4.8531”; cov |
| | | | | | “66.4057”; |
| chr22 | exon | 34996069 | 35009698 | − | gene_id “DSRCT_NG33”; transcript_id |
| | | | | | “DSRCT_NG33.4”; exon “1”; |
| chr22 | exon | 35017288 | 35017570 | − | gene_id “DSRCT_NG33”; transcript_id |
| | | | | | “DSRCT_NG33.4”; exon “2”; |
| chr22 | exon | 35022242 | 35025264 | − | gene_id “DSRCT_NG33”; transcript_id |
| | | | | | “DSRCT_NG33.4”; exon “3”; |
| chr22 | exon | 35029343 | 35029990 | − | gene_id “DSRCT_NG33”; transcript_id |
| | | | | | “DSRCT_NG33.4”; exon “4”; |
| chr22 | transcript | 34996069 | 35018039 | − | gene_id “DSRCT_NG33”; transcript_id |
| | | | | | “DSRCT_NG33.1”; RPKM “1.6945”; cov |
| | | | | | “23.1865”; |
| chr22 | exon | 34996069 | 35018039 | − | gene_id “DSRCT_NG33”; transcript_id |
| | | | | | “DSRCT_NG33.1”; exon “1”; |
| chr22 | transcript | 35018113 | 35029990 | − | gene_id “DSRCT_NG33”; transcript_id |
| | | | | | “DSRCT_NG33.2”; RPKM “0.8066”; cov |
| | | | | | “11.0366”; |
| chr22 | exon | 35018113 | 35022935 | − | gene_id “DSRCT_NG33”; transcript_id |
| | | | | | “DSRCT_NG33.2”; exon “1”; |
| chr22 | exon | 35029343 | 35029990 | − | gene_id “DSRCT_NG33”; transcript_id |
| | | | | | “DSRCT_NG33.2”; exon “2”; |
| chr22 | transcript | 35018113 | 35029990 | − | gene_id “DSRCT_NG33”; transcript_id |
| | | | | | “DSRCT_NG33.5”; RPKM “2.4835”; cov |
| | | | | | “33.9821”; |
| chr22 | exon | 35018113 | 35025264 | − | gene_id “DSRCT_NG33”; transcript_id |
| | | | | | “DSRCT_NG33.5”; exon “1”; |
| chr22 | exon | 35029343 | 35029990 | − | gene_id “DSRCT_NG33”; transcript_id |
| | | | | | “DSRCT_NG33.5”; exon “2”; |
| chr22 | transcript | 49208801 | 49212288 | + | gene_id “DSRCT_NG34”; transcript_id |
| | | | | | “DSRCT_NG34.1”; RPKM “1.3134”; cov |
| | | | | | “17.9714”; |
| chr22 | exon | 49208801 | 49210781 | + | gene_id “DSRCT_NG34”; transcript_id |
| | | | | | “DSRCT_NG34.1”; exon “1”; |
| chr22 | exon | 49210822 | 49212288 | + | gene_id “DSRCT_NG34”; transcript_id |
| | | | | | “DSRCT_NG34.1”; exon “2”; |
| chr3 | transcript | 30029973 | 30123668 | − | gene_id “DSRCT_NG9”; transcript_id |
| | | | | | “DSRCT_NG9.1”; RPKM “0.9252”; cov |
| | | | | | “12.6592”; |
| chr3 | exon | 30029973 | 30030248 | − | gene_id “DSRCT_NG9”; transcript_id |
| | | | | | “DSRCT_NG9.1”; exon “1”; |
| chr3 | exon | 30031870 | 30031940 | − | gene_id “DSRCT_NG9”; transcript_id |
| | | | | | “DSRCT_NG9.1”; exon “2”; |
| chr3 | exon | 30122117 | 30122232 | − | gene_id “DSRCT_NG9”; transcript_id |
| | | | | | “DSRCT_NG9.1”; exon “3”; |
| chr3 | exon | 30123561 | 30123668 | − | gene_id “DSRCT_NG9”; transcript_id |
| | | | | | “DSRCT_NG9.1”; exon “4”; |
| chr5 | transcript | 1193219 | 1194599 | + | gene_id “DSRCT_NG10”; transcript_id |
| | | | | | “DSRCT_NG10.1”; RPKM “15.9992”; |
| | | | | | cov “218.9200”; |
| chr5 | exon | 1193219 | 1194599 | + | gene_id “DSRCT_NG10”; transcript_id |
| | | | | | “DSRCT_NG10.1”; exon “1”; |
| chr5 | transcript | 1867478 | 1878173 | + | gene_id “DSRCT_NG11”; transcript_id |
| | | | | | “DSRCT_NG11.1”; RPKM “9.1007”; cov |
| | | | | | “124.5265”; |
| chr5 | exon | 1867478 | 1878173 | + | gene_id “DSRCT_NG11”; transcript_id |
| | | | | | “DSRCT_NG11.1”; exon “1”; |
| chr6 | transcript | 15736183 | 15752850 | + | gene_id “DSRCT_NG12”; transcript_id |
| | | | | | “DSRCT_NG12.1”; RPKM “6.0068”; cov |
| | | | | | “82.1916”; |
| chr6 | exon | 15736183 | 15736264 | + | gene_id “DSRCT_NG12”; transcript_id |
| | | | | | “DSRCT_NG12.1”; exon “1”; |
| chr6 | exon | 15743656 | 15743700 | + | gene_id “DSRCT_NG12”; transcript_id |
| | | | | | “DSRCT_NG12.1”; exon “2”; |
| chr6 | exon | 15752293 | 15752850 | + | gene_id “DSRCT_NG12”; transcript_id |
| | | | | | “DSRCT_NG12.1”; exon “3”; |
| chr7 | transcript | 1377404 | 1404247 | − | gene_id “DSRCT_NG13”; transcript_id |
| | | | | | “DSRCT_NG13.2”; RPKM “0.7915”; cov |
| | | | | | “10.8306”; |
| chr7 | exon | 1377404 | 1388668 | − | gene_id “DSRCT_NG13”; transcript_id |
| | | | | | “DSRCT_NG13.2”; exon “1”; |
| chr7 | exon | 1403678 | 1404247 | − | gene_id “DSRCT_NG13”; transcript_id |
| | | | | | “DSRCT_NG13.2”; exon “2”; |
| chr7 | transcript | 1377404 | 1404247 | − | gene_id “DSRCT_NG13”; transcript_id |
| | | | | | “DSRCT_NG13.3”; RPKM “0.9096”; cov |
| | | | | | “12.4460”; |
| chr7 | exon | 1377404 | 1378670 | − | gene_id “DSRCT_NG13”; transcript_id |
| | | | | | “DSRCT_NG13.3”; exon “1”; |
| chr7 | exon | 1384724 | 1385133 | − | gene_id “DSRCT_NG13”; transcript_id |
| | | | | | “DSRCT_NG13.3”; exon “2”; |
| chr7 | exon | 1388467 | 1388668 | − | gene_id “DSRCT_NG13”; transcript_id |
| | | | | | “DSRCT_NG13.3”; exon “3”; |
| chr7 | exon | 1402665 | 1402827 | − | gene_id “DSRCT_NG13”; transcript_id |
| | | | | | “DSRCT_NG13.3”; exon “4”; |
| chr7 | exon | 1403678 | 1404247 | − | gene_id “DSRCT_NG13”; transcript_id |
| | | | | | “DSRCT_NG13.3”; exon “5”; |
| chr7 | transcript | 1398106 | 1404247 | − | gene_id “DSRCT_NG13”; transcript_id |
| | | | | | “DSRCT_NG13.1”; RPKM “2.2803”; cov |
| | | | | | “31.2013”; |
| chr7 | exon | 1398106 | 1402827 | − | gene_id “DSRCT_NG13”; transcript_id |
| | | | | | “DSRCT_NG13.1”; exon “1”; |
| chr7 | exon | 1403678 | 1404247 | − | gene_id “DSRCT_NG13”; transcript_id |
| | | | | | “DSRCT_NG13.1”; exon “2”; |
| chr7 | transcript | 1407280 | 1419292 | + | gene_id “DSRCT_NG14”; transcript_id |
| | | | | | “DSRCT_NG14.1”; RPKM “0.8518”; cov |
| | | | | | “11.6555”; |
| chr7 | exon | 1407280 | 1408593 | + | gene_id “DSRCT_NG14”; transcript_id |
| | | | | | “DSRCT_NG14.1”; exon “1”; |
| chr7 | exon | 1417089 | 1419292 | + | gene_id “DSRCT_NG14”; transcript_id |
| | | | | | “DSRCT_NG14.1”; exon “2”; |
| chr7 | transcript | 1407280 | 1413820 | + | gene_id “DSRCT_NG14”; transcript_id |
| | | | | | “DSRCT_NG14.3”; RPKM “0.7694”; cov |
| | | | | | “10.5282”; |
| chr7 | exon | 1407280 | 1408593 | + | gene_id “DSRCT_NG14”; transcript_id |
| | | | | | “DSRCT_NG14.3”; exon “1”; |
| chr7 | exon | 1410383 | 1413820 | + | gene_id “DSRCT_NG14”; transcript_id |
| | | | | | “DSRCT_NG14.3”; exon “2”; |
| chr7 | transcript | 1409045 | 1413820 | + | gene_id “DSRCT_NG14”; transcript_id |
| | | | | | “DSRCT_NG14.2”; RPKM “3.2007”; cov |
| | | | | | “43.7953”; |
| chr7 | exon | 1409045 | 1413820 | + | gene_id “DSRCT_NG14”; transcript_id |
| | | | | | “DSRCT_NG14.2”; exon “1”; |
| chr7 | transcript | 5878487 | 5887078 | − | gene_id “DSRCT_NG15”; transcript_id |
| | | | | | “DSRCT_NG15.1”; RPKM “1.2742”; cov |
| | | | | | “17.4355”; |
| chr7 | exon | 5878487 | 5880534 | − | gene_id “DSRCT_NG15”; transcript_id |
| | | | | | “DSRCT_NG15.1”; exon “1”; |
| chr7 | exon | 5886636 | 5887078 | − | gene_id “DSRCT_NG15”; transcript_id |
| | | | | | “DSRCT_NG15.1”; exon “2”; |
| chr7 | transcript | 131758168 | 131777037 | − | gene_id “DSRCT_NG16”; transcript_id |
| | | | | | “DSRCT_NG16.1”; RPKM “1.8583”; cov |
| | | | | | “25.4270”; |
| chr7 | exon | 131758168 | 131759334 | − | gene_id “DSRCT_NG16”; transcript_id |
| | | | | | “DSRCT_NG16.1”; exon “1”; |
| chr7 | exon | 131761158 | 131765750 | − | gene_id “DSRCT_NG16”; transcript_id |
| | | | | | “DSRCT_NG16.1”; exon “2”; |
| chr7 | exon | 131776730 | 131777037 | − | gene_id “DSRCT_NG16”; transcript_id |
| | | | | | “DSRCT_NG16.1”; exon “3”; |
| chr7 | transcript | 131758168 | 131777037 | − | gene_id “DSRCT_NG16”; transcript_id |
| | | | | | “DSRCT_NG16.2”; RPKM “2.1962”; cov |
| | | | | | “30.0511”; |
| chr7 | exon | 131758168 | 131765750 | − | gene_id “DSRCT_NG16”; transcript_id |
| | | | | | “DSRCT_NG16.2”; exon “1”; |
| chr7 | exon | 131776730 | 131777037 | − | gene_id “DSRCT_NG16”; transcript_id |
| | | | | | “DSRCT_NG16.2”; exon “2”; |
| chr7 | transcript | 152986290 | 152987100 | − | gene_id “DSRCT_NG17”; transcript_id |
| | | | | | “DSRCT_NG17.1”; RPKM “5.8472”; cov |
| | | | | | “80.0080”; |
| chr7 | exon | 152986290 | 152986596 | − | gene_id “DSRCT_NG17”; transcript_id |
| | | | | | “DSRCT_NG17.1”; exon “1”; |
| chr7 | exon | 152986682 | 152987100 | − | gene_id “DSRCT_NG17”; transcript_id |
| | | | | | “DSRCT_NG17.1”; exon “2”; |
| chr7 | transcript | 152986290 | 152987100 | − | gene_id “DSRCT_NG17”; transcript_id |
| | | | | | “DSRCT_NG17.2”; RPKM “1.6965”; cov |
| | | | | | “23.2136”; |
| chr7 | exon | 152986290 | 152987100 | − | gene_id “DSRCT_NG17”; transcript_id |
| | | | | | “DSRCT_NG17.2”; exon “1”; |
| chr8 | transcript | 25979059 | 25994825 | − | gene_id “DSRCT_NG18”; transcript_id |
| | | | | | “DSRCT_NG18.3”; RPKM “0.9659”; cov |
| | | | | | “13.2161”; |
| chr8 | exon | 25979059 | 25979858 | − | gene_id “DSRCT_NG18”; transcript_id |
| | | | | | “DSRCT_NG18.3”; exon “1”; |
| chr8 | exon | 25983085 | 25983243 | − | gene_id “DSRCT_NG18”; transcript_id |
| | | | | | “DSRCT_NG18.3”; exon “2”; |
| chr8 | exon | 25983746 | 25983916 | − | gene_id “DSRCT_NG18”; transcript_id |
| | | | | | “DSRCT_NG18.3”; exon “3”; |
| chr8 | exon | 25984629 | 25994825 | − | gene_id “DSRCT_NG18”; transcript_id |
| | | | | | “DSRCT_NG18.3”; exon “4”; |
| chr8 | transcript | 25979059 | 26055947 | − | gene_id “DSRCT_NG18”; transcript_id |
| | | | | | “DSRCT_NG18.4”; RPKM “0.9707”; cov |
| | | | | | “13.2816”; |
| chr8 | exon | 25979059 | 25979858 | − | gene_id “DSRCT_NG18”; transcript_id |
| | | | | | “DSRCT_NG18.4”; exon “1”; |
| chr8 | exon | 25983085 | 25983243 | − | gene_id “DSRCT_NG18”; transcript_id |
| | | | | | “DSRCT_NG18.4”; exon “2”; |
| chr8 | exon | 25983746 | 25983916 | − | gene_id “DSRCT_NG18”; transcript_id |
| | | | | | “DSRCT_NG18.4”; exon “3”; |
| chr8 | exon | 25984629 | 25994512 | − | gene_id “DSRCT_NG18”; transcript_id |
| | | | | | “DSRCT_NG18.4”; exon “4”; |
| chr8 | exon | 25999885 | 26000057 | − | gene_id “DSRCT_NG18”; transcript_id |
| | | | | | “DSRCT_NG18.4”; exon “5”; |
| chr8 | exon | 26048270 | 26048392 | − | gene_id “DSRCT_NG18”; transcript_id |
| | | | | | “DSRCT_NG18.4”; exon “6”; |
| chr8 | exon | 26055614 | 26055947 | − | gene_id “DSRCT_NG18”; transcript_id |
| | | | | | “DSRCT_NG18.4”; exon “7”; |
| chr8 | transcript | 26046318 | 26055947 | − | gene_id “DSRCT_NG18”; transcript_id |
| | | | | | “DSRCT_NG18.2”; RPKM “2.1028”; cov |
| | | | | | “28.7736”; |
| chr8 | exon | 26046318 | 26048392 | − | gene_id “DSRCT_NG18”; transcript_id |
| | | | | | “DSRCT_NG18.2”; exon “1”; |
| chr8 | exon | 26055614 | 26055947 | − | gene_id “DSRCT_NG18”; transcript_id |
| | | | | | “DSRCT_NG18.2”; exon “2”; |
| chr8 | transcript | 26054041 | 26055947 | − | gene_id “DSRCT_NG18”; transcript_id |
| | | | | | “DSRCT_NG18.1”; RPKM “4.3022”; cov |
| | | | | | “58.8673”; |
| chr8 | exon | 26054041 | 26055947 | − | gene_id “DSRCT_NG18”; transcript_id |
| | | | | | “DSRCT_NG18.1”; exon “1”; |
| chr8 | transcript | 116047600 | 116055631 | − | gene_id “DSRCT_NG19”; transcript_id |
| | | | | | “DSRCT_NG19.1”; RPKM “1.1066”; cov |
| | | | | | “15.1411”; |
| chr8 | exon | 116047600 | 116048248 | − | gene_id “DSRCT_NG19”; transcript_id |
| | | | | | “DSRCT_NG19.1”; exon “1”; |
| chr8 | exon | 116048445 | 116048588 | − | gene_id “DSRCT_NG19”; transcript_id |
| | | | | | “DSRCT_NG19.1”; exon “2”; |
| chr8 | exon | 116049816 | 116050126 | − | gene_id “DSRCT_NG19”; transcript_id |
| | | | | | “DSRCT_NG19.1”; exon “3”; |
| chr8 | exon | 116055449 | 116055631 | − | gene_id “DSRCT_NG19”; transcript_id |
| | | | | | “DSRCT_NG19.1”; exon “4”; |
| chr9 | transcript | 136356276 | 136371612 | + | gene_id “DSRCT_NG20”; transcript_id |
| | | | | | “DSRCT_NG20.1”; RPKM “9.6178”; cov |
| | | | | | “131.6026”; |
| chr9 | exon | 136356276 | 136356452 | + | gene_id “DSRCT_NG20”; transcript_id |
| | | | | | “DSRCT_NG20.1”; exon “1”; |
| chr9 | exon | 136356833 | 136360492 | + | gene_id “DSRCT_NG20”; transcript_id |
| | | | | | “DSRCT_NG20.1”; exon “2”; |
| chr9 | exon | 136364876 | 136364997 | + | gene_id “DSRCT_NG20”; transcript_id |
| | | | | | “DSRCT_NG20.1”; exon “3”; |
| chr9 | exon | 136365707 | 136371612 | + | gene_id “DSRCT_NG20”; transcript_id |
| | | | | | “DSRCT_NG20.1”; exon “4”; |
| chr9 | transcript | 136356276 | 136371612 | + | gene_id “DSRCT_NG20”; transcript_id |
| | | | | | “DSRCT_NG20.2”; RPKM “3.5503”; cov |
| | | | | | “48.5787”; |
| chr9 | exon | 136356276 | 136356610 | + | gene_id “DSRCT_NG20”; transcript_id |
| | | | | | “DSRCT_NG20.2”; exon “1”; |
| chr9 | exon | 136356833 | 136360492 | + | gene_id “DSRCT_NG20”; transcript_id |
| | | | | | “DSRCT_NG20.2”; exon “2”; |
| chr9 | exon | 136364876 | 136364997 | + | gene_id “DSRCT_NG20”; transcript_id |
| | | | | | “DSRCT_NG20.2”; exon “3”; |
| chr9 | exon | 136365707 | 136371612 | + | gene_id “DSRCT_NG20”; transcript_id |
| | | | | | “DSRCT_NG20.2”; exon “4”; |
| chr9 | transcript | 136356276 | 136371612 | + | gene_id “DSRCT_NG20”; transcript_id |
| | | | | | “DSRCT_NG20.3”; RPKM “10.4007”; |
| | | | | | cov “142.3147”; |
| chr9 | exon | 136356276 | 136356498 | + | gene_id “DSRCT_NG20”; transcript_id |
| | | | | | “DSRCT_NG20.3”; exon “1”; |
| chr9 | exon | 136356833 | 136360492 | + | gene_id “DSRCT_NG20”; transcript_id |
| | | | | | “DSRCT_NG20.3”; exon “2”; |
| chr9 | exon | 136364876 | 136364997 | + | gene_id “DSRCT_NG20”; transcript_id |
| | | | | | “DSRCT_NG20.3”; exon “3”; |
| chr9 | exon | 136365707 | 136371612 | + | gene_id “DSRCT_NG20”; transcript_id |
| | | | | | “DSRCT_NG20.3”; exon “4”; |
| chr9 | transcript | 136356276 | 136371612 | + | gene_id “DSRCT_NG20”; transcript_id |
| | | | | | “DSRCT_NG20.4”; RPKM “0.8778”; cov |
| | | | | | “12.0113”; |
| chr9 | exon | 136356276 | 136356498 | + | gene_id “DSRCT_NG20”; transcript_id |
| | | | | | “DSRCT_NG20.4”; exon “1”; |
| chr9 | exon | 136356833 | 136356948 | + | gene_id “DSRCT_NG20”; transcript_id |
| | | | | | “DSRCT_NG20.4”; exon “2”; |
| chr9 | exon | 136358438 | 136360492 | + | gene_id “DSRCT_NG20”; transcript_id |
| | | | | | “DSRCT_NG20.4”; exon “3”; |
| chr9 | exon | 136364876 | 136364997 | + | gene_id “DSRCT_NG20”; transcript_id |
| | | | | | “DSRCT_NG20.4”; exon “4”; |
| chr9 | exon | 136365707 | 136371612 | + | gene_id “DSRCT_NG20”; transcript_id |
| | | | | | “DSRCT_NG20.4”; exon “5”; |
| chr9 | transcript | 136356276 | 136371612 | + | gene_id “DSRCT_NG20”; transcript_id |
| | | | | | “DSRCT_NG20.5”; RPKM “1.0534”; cov |
| | | | | | “14.4136”; |
| chr9 | exon | 136356276 | 136356452 | + | gene_id “DSRCT_NG20”; transcript_id |
| | | | | | “DSRCT_NG20.5”; exon “1”; |
| chr9 | exon | 136356833 | 136356948 | + | gene_id “DSRCT_NG20”; transcript_id |
| | | | | | “DSRCT_NG20.5”; exon “2”; |
| chr9 | exon | 136358438 | 136360492 | + | gene_id “DSRCT_NG20”; transcript_id |
| | | | | | “DSRCT_NG20.5”; exon “3”; |
| chr9 | exon | 136364876 | 136364997 | + | gene_id “DSRCT_NG20”; transcript_id |
| | | | | | “DSRCT_NG20.5”; exon “4”; |
| chr9 | exon | 136365707 | 136371612 | + | gene_id “DSRCT_NG20”; transcript_id |
| | | | | | “DSRCT_NG20.5”; exon “5”; |
| chr9 | transcript | 136356276 | 136371612 | + | gene_id “DSRCT_NG20”; transcript_id |
| | | | | | “DSRCT_NG20.6”; RPKM “1.6491”; cov |
| | | | | | “22.5646”; |
| chr9 | exon | 136356276 | 136356498 | + | gene_id “DSRCT_NG20”; transcript_id |
| | | | | | “DSRCT_NG20.6”; exon “1”; |
| chr9 | exon | 136356833 | 136356948 | + | gene_id “DSRCT_NG20”; transcript_id |
| | | | | | “DSRCT_NG20.6”; exon “2”; |
| chr9 | exon | 136358438 | 136358534 | + | gene_id “DSRCT_NG20”; transcript_id |
| | | | | | “DSRCT_NG20.6”; exon “3”; |
| chr9 | exon | 136360173 | 136360492 | + | gene_id “DSRCT_NG20”; transcript_id |
| | | | | | “DSRCT_NG20.6”; exon “4”; |
| chr9 | exon | 136364876 | 136364997 | + | gene_id “DSRCT_NG20”; transcript_id |
| | | | | | “DSRCT_NG20.6”; exon “5”; |
| chr9 | exon | 136365707 | 136371612 | + | gene_id “DSRCT_NG20”; transcript_id |
| | | | | | “DSRCT_NG20.6”; exon “6”; |
| chr9 | transcript | 136356276 | 136371612 | + | gene_id “DSRCT_NG20”; transcript_id |
| | | | | | “DSRCT_NG20.7”; RPKM “3.1882”; cov |
| | | | | | “43.6246”; |
| chr9 | exon | 136356276 | 136356452 | + | gene_id “DSRCT_NG20”; transcript_id |
| | | | | | “DSRCT_NG20.7”; exon “1”; |
| chr9 | exon | 136356833 | 136356948 | + | gene_id “DSRCT_NG20”; transcript_id |
| | | | | | “DSRCT_NG20.7”; exon “2”; |
| chr9 | exon | 136358438 | 136358534 | + | gene_id “DSRCT_NG20”; transcript_id |
| | | | | | “DSRCT_NG20.7”; exon “3”; |
| chr9 | exon | 136360173 | 136360492 | + | gene_id “DSRCT_NG20”; transcript_id |
| | | | | | “DSRCT_NG20.7”; exon “4”; |
| chr9 | exon | 136364876 | 136364997 | + | gene_id “DSRCT_NG20”; transcript_id |
| | | | | | “DSRCT_NG20.7”; exon “5”; |
| chr9 | exon | 136365707 | 136371612 | + | gene_id “DSRCT_NG20”; transcript_id |
| | | | | | “DSRCT_NG20.7”; exon “6”; |
| chr9 | transcript | 136356276 | 136371612 | + | gene_id “DSRCT_NG20”; transcript_id |
| | | | | | “DSRCT_NG20.8”; RPKM “1.6490”; cov |
| | | | | | “22.5641”; |
| chr9 | exon | 136356276 | 136356610 | + | gene_id “DSRCT_NG20”; transcript_id |
| | | | | | “DSRCT_NG20.8”; exon “1”; |
| chr9 | exon | 136356833 | 136356948 | + | gene_id “DSRCT_NG20”; transcript_id |
| | | | | | “DSRCT_NG20.8”; exon “2”; |
| chr9 | exon | 136358438 | 136358534 | + | gene_id “DSRCT_NG20”; transcript_id |
| | | | | | “DSRCT_NG20.8”; exon “3”; |
| chr9 | exon | 136360173 | 136360492 | + | gene_id “DSRCT_NG20”; transcript_id |
| | | | | | “DSRCT_NG20.8”; exon “4”; |
| chr9 | exon | 136364876 | 136364997 | + | gene_id “DSRCT_NG20”; transcript_id |
| | | | | | “DSRCT_NG20.8”; exon “5”; |
| chr9 | exon | 136365707 | 136371612 | + | gene_id “DSRCT_NG20”; transcript_id |
| | | | | | “DSRCT_NG20.8”; exon “6”; |
| chr9 | transcript | 138495151 | 138500931 | − | gene_id “DSRCT_NG21”; transcript_id |
| | | | | | “DSRCT_NG21.1”; RPKM “0.9881”; cov |
| | | | | | “13.5208”; |
| chr9 | exon | 138495151 | 138495696 | − | gene_id “DSRCT_NG21”; transcript_id |
| | | | | | “DSRCT_NG21.1”; exon “1”; |
| chr9 | exon | 138495870 | 138495952 | − | gene_id “DSRCT_NG21”; transcript_id |
| | | | | | “DSRCT_NG21.1”; exon “2”; |
| chr9 | exon | 138500647 | 138500931 | − | gene_id “DSRCT_NG21”; transcript_id |
| | | | | | “DSRCT_NG21.1”; exon “3”; |
| chr9 | transcript | 138495151 | 138500931 | − | gene_id “DSRCT_NG21”; transcript_id |
| | | | | | “DSRCT_NG21.2”; RPKM “3.7878”; cov |
| | | | | | “51.8293”; |
| chr9 | exon | 138495151 | 138495696 | − | gene_id “DSRCT_NG21”; transcript_id |
| | | | | | “DSRCT_NG21.2”; exon “1”; |
| chr9 | exon | 138495870 | 138495952 | − | gene_id “DSRCT_NG21”; transcript_id |
| | | | | | “DSRCT_NG21.2”; exon “2”; |
| chr9 | exon | 138496856 | 138498324 | − | gene_id “DSRCT_NG21”; transcript_id |
| | | | | | “DSRCT_NG21.2”; exon “3”; |
| chr9 | exon | 138498650 | 138500931 | − | gene_id “DSRCT_NG21”; transcript_id |
| | | | | | “DSRCT_NG21.2”; exon “4”; |
| chr9 | transcript | 138495151 | 138500931 | − | gene_id “DSRCT_NG21”; transcript_id |
| | | | | | “DSRCT_NG21.3”; RPKM “18.2064”; |
| | | | | | cov “249.1209”; |
| chr9 | exon | 138495151 | 138495696 | − | gene_id “DSRCT_NG21”; transcript_id |
| | | | | | “DSRCT_NG21.3”; exon “1”; |
| chr9 | exon | 138495870 | 138495952 | − | gene_id “DSRCT_NG21”; transcript_id |
| | | | | | “DSRCT_NG21.3”; exon “2”; |
| chr9 | exon | 138496856 | 138500931 | − | gene_id “DSRCT_NG21”; transcript_id |
| | | | | | “DSRCT_NG21.3”; exon “3”; |
| chr9 | transcript | 138500941 | 138511703 | − | gene_id “DSRCT_NG21”; transcript_id |
| | | | | | “DSRCT_NG21.4”; RPKM “5.6489”; cov |
| | | | | | “77.2948”; |
| chr9 | exon | 138500941 | 138509226 | − | gene_id “DSRCT_NG21”; transcript_id |
| | | | | | “DSRCT_NG21.4”; exon “1”; |
| chr9 | exon | 138511488 | 138511703 | − | gene_id “DSRCT_NG21”; transcript_id |
| | | | | | “DSRCT_NG21.4”; exon “2”; |
| chr9 | transcript | 138500941 | 138511703 | − | gene_id “DSRCT_NG21”; transcript_id |
| | | | | | “DSRCT_NG21.5”; RPKM “2.8431”; cov |
| | | | | | “38.9020”; |
| chr9 | exon | 138500941 | 138508699 | − | gene_id “DSRCT_NG21”; transcript_id |
| | | | | | “DSRCT_NG21.5”; exon “1”; |
| chr9 | exon | 138508847 | 138511703 | − | gene_id “DSRCT_NG21”; transcript_id |
| | | | | | “DSRCT_NG21.5”; exon “2”; |
| chr9 | transcript | 141094206 | 141096020 | + | gene_id “DSRCT_NG22”; transcript_id |
| | | | | | “DSRCT_NG22.2”; RPKM “1.0558”; cov |
| | | | | | “14.4472”; |
| chr9 | exon | 141094206 | 141095399 | + | gene_id “DSRCT_NG22”; transcript_id |
| | | | | | “DSRCT_NG22.2”; exon “1”; |
| chr9 | exon | 141095572 | 141096020 | + | gene_id “DSRCT_NG22”; transcript_id |
| | | | | | “DSRCT_NG22.2”; exon “2”; |
| chr9 | transcript | 141097131 | 141105737 | + | gene_id “DSRCT_NG22”; transcript_id |
| | | | | | “DSRCT_NG22.1”; RPKM “2.1738”; cov |
| | | | | | “29.7445”; |
| chr9 | exon | 141097131 | 141105737 | + | gene_id “DSRCT_NG22”; transcript_id |
| | | | | | “DSRCT_NG22.1”; exon “1”; |
| chrX | transcript | 46062674 | 46067276 | + | gene_id “DSRCT_NG35”; transcript_id |
| | | | | | “DSRCT_NG35.1”; RPKM “4.4527”; cov |
| | | | | | “60.9276”; |
| chrX | exon | 46062674 | 46063184 | + | gene_id “DSRCT_NG35”; transcript_id |
| | | | | | “DSRCT_NG35.1”; exon “1”; |
| chrX | exon | 46067111 | 46067276 | + | gene_id “DSRCT_NG35”; transcript_id |
| | | | | | “DSRCT_NG35.1”; exon “2”; |
| chrX | transcript | 72094599 | 72151083 | + | gene_id “DSRCT_NG36”; transcript_id |
| | | | | | “DSRCT_NG36.1”; RPKM “4.4849”; cov |
| | | | | | “61.3680”; |
| chrX | exon | 72094599 | 72095190 | + | gene_id “DSRCT_NG36”; transcript_id |
| | | | | | “DSRCT_NG36.1”; exon “1”; |
| chrX | exon | 72150325 | 72151083 | + | gene_id “DSRCT_NG36”; transcript_id |
| | | | | | “DSRCT_NG36.1”; exon “2”; |
| chrX | transcript | 72094599 | 72135474 | + | gene_id “DSRCT_NG36”; transcript_id |
| | | | | | “DSRCT_NG36.2”; RPKM “9.9352”; cov |
| | | | | | “135.9456”; |
| chrX | exon | 72094599 | 72095190 | + | gene_id “DSRCT_NG36”; transcript_id |
| | | | | | “DSRCT_NG36.2”; exon “1”; |
| chrX | exon | 72131963 | 72135474 | + | gene_id “DSRCT_NG36”; transcript_id |
| | | | | | “DSRCT_NG36.2”; exon “2”; |
| chrX | transcript | 72154383 | 72160192 | − | gene_id “DSRCT_NG37”; transcript_id |
| | | | | | “DSRCT_NG37.2”; RPKM “2.4319”; cov |
| | | | | | “33.2755”; |
| chrX | exon | 72154383 | 72155867 | − | gene_id “DSRCT_NG37”; transcript_id |
| | | | | | “DSRCT_NG37.2”; exon “1”; |
| chrX | exon | 72156441 | 72156527 | − | gene_id “DSRCT_NG37”; transcript_id |
| | | | | | “DSRCT_NG37.2”; exon “2”; |
| chrX | exon | 72157185 | 72160192 | − | gene_id “DSRCT_NG37”; transcript_id |
| | | | | | “DSRCT_NG37.2”; exon “3”; |
| chrX | transcript | 72154383 | 72160192 | − | gene_id “DSRCT_NG37”; transcript_id |
| | | | | | “DSRCT_NG37.1”; RPKM “3.1563”; cov |
| | | | | | “43.1876”; |
| chrX | exon | 72154383 | 72155867 | − | gene_id “DSRCT_NG37”; transcript_id |
| | | | | | “DSRCT_NG37.1”; exon “1”; |
| chrX | exon | 72156441 | 72156527 | − | gene_id “DSRCT_NG37”; transcript_id |
| | | | | | “DSRCT_NG37.1”; exon “2”; |
| chrX | exon | 72157185 | 72157326 | − | gene_id “DSRCT_NG37”; transcript_id |
| | | | | | “DSRCT_NG37.1”; exon “3”; |
| chrX | exon | 72157425 | 72157531 | − | gene_id “DSRCT_NG37”; transcript_id |
| | | | | | “DSRCT_NG37.1”; exon “4”; |
| chrX | exon | 72157738 | 72160192 | − | gene_id “DSRCT_NG37”; transcript_id |
| | | | | | “DSRCT_NG37.1”; exon “5”; |
| chr1 | transcript | 48072017 | 48122983 | − | gene_id “NFAT_NG1”; transcript_id |
| | | | | | “NFAT_NG1.2”; RPKM “8.0423”; cov |
| | | | | | “111.3846”; |
| chr1 | exon | 48072017 | 48073614 | − | gene_id “NFAT_NG1”; transcript_id |
| | | | | | “NFAT_NG1.2”; exon “1”; |
| chr1 | exon | 48122775 | 48122983 | − | gene_id “NFAT_NG1”; transcript_id |
| | | | | | “NFAT_NG1.2”; exon “2”; |
| chr1 | transcript | 48119261 | 48122983 | − | gene_id “NFAT_NG1”; transcript_id |
| | | | | | “NFAT_NG1.1”; RPKM “3.1750”; cov |
| | | | | | “43.9732”; |
| chr1 | exon | 48119261 | 48122983 | − | gene_id “NFAT_NG1”; transcript_id |
| | | | | | “NFAT_NG1.1”; exon “1”; |
| chr1 | transcript | 105112322 | 105116825 | − | gene_id “NFAT_NG2”; transcript_id |
| | | | | | “NFAT_NG2.1”; RPKM “4.9522”; cov |
| | | | | | “68.5868”; |
| chr1 | exon | 105112322 | 105116825 | − | gene_id “NFAT_NG2”; transcript_id |
| | | | | | “NFAT_NG2.1”; exon “1”; |
| chr1 | transcript | 157350793 | 157360394 | + | gene_id “NFAT_NG3”; transcript_id |
| | | | | | “NFAT_NG3.1”; RPKM “2.7227”; cov |
| | | | | | “37.7090”; |
| chr1 | exon | 157350793 | 157351005 | + | gene_id “NFAT_NG3”; transcript_id |
| | | | | | “NFAT_NG3.1”; exon “1”; |
| chr1 | exon | 157353091 | 157353222 | + | gene_id “NFAT_NG3”; transcript_id |
| | | | | | “NFAT_NG3.1”; exon “2”; |
| chr1 | exon | 157360083 | 157360394 | + | gene_id “NFAT_NG3”; transcript_id |
| | | | | | “NFAT_NG3.1”; exon “3”; |
| chr1 | transcript | 157381478 | 157389278 | + | gene_id “NFAT_NG4”; transcript_id |
| | | | | | “NFAT_NG4.1”; RPKM “1.0039”; cov |
| | | | | | “13.9041”; |
| chr1 | exon | 157381478 | 157384579 | + | gene_id “NFAT_NG4”; transcript_id |
| | | | | | “NFAT_NG4.1”; exon “1”; |
| chr1 | exon | 157386528 | 157386619 | + | gene_id “NFAT_NG4”; transcript_id |
| | | | | | “NFAT_NG4.1”; exon “2”; |
| chr1 | exon | 157386907 | 157389278 | + | gene_id “NFAT_NG4”; transcript_id |
| | | | | | “NFAT_NG4.1”; exon “3”; |
| chr1 | transcript | 157381478 | 157389278 | + | gene_id “NFAT_NG4”; transcript_id |
| | | | | | “NFAT_NG4.2”; RPKM “1.1455”; cov |
| | | | | | “15.8646”; |
| chr1 | exon | 157381478 | 157386619 | + | gene_id “NFAT_NG4”; transcript_id |
| | | | | | “NFAT_NG4.2”; exon “1”; |
| chr1 | exon | 157386907 | 157389278 | + | gene_id “NFAT_NG4”; transcript_id |
| | | | | | “NFAT_NG4.2”; exon “2”; |
| chr1 | transcript | 247451836 | 247454103 | + | gene_id “NFAT_NG5”; transcript_id |
| | | | | | “NFAT_NG5.1”; RPKM “2.2625”; cov |
| | | | | | “31.3354”; |
| chr1 | exon | 247451836 | 247452084 | + | gene_id “NFAT_NG5”; transcript_id |
| | | | | | “NFAT_NG5.1”; exon “1”; |
| chr1 | exon | 247453742 | 247454103 | + | gene_id “NFAT_NG5”; transcript_id |
| | | | | | “NFAT_NG5.1”; exon “2”; |
| chr1 | transcript | 247451836 | 247454103 | + | gene_id “NFAT_NG5”; transcript_id |
| | | | | | “NFAT_NG5.2”; RPKM “3.1260”; cov |
| | | | | | “43.2954”; |
| chr1 | exon | 247451836 | 247452084 | + | gene_id “NFAT_NG5”; transcript_id |
| | | | | | “NFAT_NG5.2”; exon “1”; |
| chr1 | exon | 247453496 | 247454103 | + | gene_id “NFAT_NG5”; transcript_id |
| | | | | | “NFAT_NG5.2”; exon “2”; |
| chr10 | transcript | 123371298 | 123371778 | + | gene_id “NFAT_NG31”; transcript_id |
| | | | | | “NFAT_NG31.1”; RPKM “14.4823”; cov |
| | | | | | “200.5780”; |
| chr10 | exon | 123371298 | 123371778 | + | gene_id “NFAT_NG31”; transcript_id |
| | | | | | “NFAT_NG31.1”; exon “1”; |
| chr10 | transcript | 123395103 | 123399638 | − | gene_id “NFAT_NG32”; transcript_id |
| | | | | | “NFAT_NG32.1”; RPKM “6.4070”; cov |
| | | | | | “88.7368”; |
| chr10 | exon | 123395103 | 123399638 | − | gene_id “NFAT_NG32”; transcript_id |
| | | | | | “NFAT_NG32.1”; exon “1”; |
| chr11 | transcript | 30811427 | 30812101 | − | gene_id “NFAT_NG33”; transcript_id |
| | | | | | “NFAT_NG33.1”; RPKM “18.1084”; cov |
| | | | | | “250.8000”; |
| chr11 | exon | 30811427 | 30812101 | − | gene_id “NFAT_NG33”; transcript_id |
| | | | | | “NFAT_NG33.1”; exon “1”; |
| chr11 | transcript | 30839762 | 30840096 | − | gene_id “NFAT_NG34”; transcript_id |
| | | | | | “NFAT_NG34.1”; RPKM “4.1968”; cov |
| | | | | | “58.1254”; |
| chr11 | exon | 30839762 | 30840096 | − | gene_id “NFAT_NG34”; transcript_id |
| | | | | | “NFAT_NG34.1”; exon “1”; |
| chr11 | transcript | 119846297 | 119894280 | + | gene_id “NFAT_NG35”; transcript_id |
| | | | | | “NFAT_NG35.1”; RPKM “1.9097”; cov |
| | | | | | “26.4496”; |
| chr11 | exon | 119846297 | 119846861 | + | gene_id “NFAT_NG35”; transcript_id |
| | | | | | “NFAT_NG35.1”; exon “1”; |
| chr11 | exon | 119881564 | 119894280 | + | gene_id “NFAT_NG35”; transcript_id |
| | | | | | “NFAT_NG35.1”; exon “2”; |
| chr12 | transcript | 67840399 | 67900475 | − | gene_id “NFAT_NG36”; transcript_id |
| | | | | | “NFAT_NG36.1”; RPKM “3.0848”; cov |
| | | | | | “42.7241”; |
| chr12 | exon | 67840399 | 67840630 | − | gene_id “NFAT_NG36”; transcript_id |
| | | | | | “NFAT_NG36.1”; exon “1”; |
| chr12 | exon | 67900251 | 67900475 | − | gene_id “NFAT_NG36”; transcript_id |
| | | | | | “NFAT_NG36.1”; exon “2”; |
| chr12 | transcript | 97370395 | 97372279 | + | gene_id “NFAT_NG37”; transcript_id |
| | | | | | “NFAT_NG37.1”; RPKM “7.7168”; cov |
| | | | | | “106.8767”; |
| chr12 | exon | 97370395 | 97370521 | + | gene_id “NFAT_NG37”; transcript_id |
| | | | | | “NFAT_NG37.1”; exon “1”; |
| chr12 | exon | 97372118 | 97372279 | + | gene_id “NFAT_NG37”; transcript_id |
| | | | | | “NFAT_NG37.1”; exon “2”; |
| chr12 | transcript | 97370395 | 97375253 | + | gene_id “NFAT_NG37”; transcript_id |
| | | | | | “NFAT_NG37.2”; RPKM “1.9197”; cov |
| | | | | | “26.5872”; |
| chr12 | exon | 97370395 | 97370521 | + | gene_id “NFAT_NG37”; transcript_id |
| | | | | | “NFAT_NG37.2”; exon “1”; |
| chr12 | exon | 97373311 | 97375253 | + | gene_id “NFAT_NG37”; transcript_id |
| | | | | | “NFAT_NG37.2”; exon “2”; |
| chr13 | transcript | 98714143 | 98716660 | − | gene_id “NFAT_NG38”; transcript_id |
| | | | | | “NFAT_NG38.1”; RPKM “41.0034”; cov |
| | | | | | “567.8922”; |
| chr13 | exon | 98714143 | 98714574 | − | gene_id “NFAT_NG38”; transcript_id |
| | | | | | “NFAT_NG38.1”; exon “1”; |
| chr13 | exon | 98716286 | 98716660 | − | gene_id “NFAT_NG38”; transcript_id |
| | | | | | “NFAT_NG38.1”; exon “2”; |
| chr17 | transcript | 40322903 | 40324207 | + | gene_id “NFAT_NG39”; transcript_id |
| | | | | | “NFAT_NG39.1”; RPKM “1.4773”; cov |
| | | | | | “20.4599”; |
| chr17 | exon | 40322903 | 40323018 | + | gene_id “NFAT_NG39”; transcript_id |
| | | | | | “NFAT_NG39.1”; exon “1”; |
| chr17 | exon | 40323865 | 40324207 | + | gene_id “NFAT_NG39”; transcript_id |
| | | | | | “NFAT_NG39.1”; exon “2”; |
| chr17 | transcript | 40322903 | 40324207 | + | gene_id “NFAT_NG39”; transcript_id |
| | | | | | “NFAT_NG39.2”; RPKM “9.6034”; cov |
| | | | | | “133.0066”; |
| chr17 | exon | 40322903 | 40323160 | + | gene_id “NFAT_NG39”; transcript_id |
| | | | | | “NFAT_NG39.2”; exon “1”; |
| chr17 | exon | 40323865 | 40324207 | + | gene_id “NFAT_NG39”; transcript_id |
| | | | | | “NFAT_NG39.2”; exon “2”; |
| chr17 | transcript | 67140805 | 67141049 | + | gene_id “NFAT_NG40”; transcript_id |
| | | | | | “NFAT_NG40.1”; RPKM “6.3512”; cov |
| | | | | | “87.9633”; |
| chr17 | exon | 67140805 | 67141049 | + | gene_id “NFAT_NG40”; transcript_id |
| | | | | | “NFAT_NG40.1”; exon “1”; |
| chr19 | transcript | 13779661 | 13782996 | − | gene_id “NFAT_NG41”; transcript_id |
| | | | | | “NFAT_NG41.1”; RPKM “1.6627”; cov |
| | | | | | “23.0275”; |
| chr19 | exon | 13779661 | 13782996 | − | gene_id “NFAT_NG41”; transcript_id |
| | | | | | “NFAT_NG41.1”; exon “1”; |
| chr19 | transcript | 13781526 | 13794556 | − | gene_id “NFAT_NG41”; transcript_id |
| | | | | | “NFAT_NG41.2”; RPKM “2.7593”; cov |
| | | | | | “38.2165”; |
| chr19 | exon | 13781526 | 13782513 | − | gene_id “NFAT_NG41”; transcript_id |
| | | | | | “NFAT_NG41.2”; exon “1”; |
| chr19 | exon | 13789861 | 13790010 | − | gene_id “NFAT_NG41”; transcript_id |
| | | | | | “NFAT_NG41.2”; exon “2”; |
| chr19 | exon | 13792124 | 13794556 | − | gene_id “NFAT_NG41”; transcript_id |
| | | | | | “NFAT_NG41.2”; exon “3”; |
| chr19 | transcript | 13794639 | 13805316 | − | gene_id “NFAT_NG41”; transcript_id |
| | | | | | “NFAT_NG41.13”; RPKM “2.5583”; cov |
| | | | | | “35.4322”; |
| chr19 | exon | 13794639 | 13796795 | − | gene_id “NFAT_NG41”; transcript_id |
| | | | | | “NFAT_NG41.13”; exon “1”; |
| chr19 | exon | 13798951 | 13805316 | − | gene_id “NFAT_NG41”; transcript_id |
| | | | | | “NFAT_NG41.13”; exon “2”; |
| chr19 | transcript | 13794639 | 13805316 | − | gene_id “NFAT_NG41”; transcript_id |
| | | | | | “NFAT_NG41.9”; RPKM “1.1001”; cov |
| | | | | | “15.2365”; |
| chr19 | exon | 13794639 | 13795080 | − | gene_id “NFAT_NG41”; transcript_id |
| | | | | | “NFAT_NG41.9”; exon “1”; |
| chr19 | exon | 13796644 | 13796795 | − | gene_id “NFAT_NG41”; transcript_id |
| | | | | | “NFAT_NG41.9”; exon “2”; |
| chr19 | exon | 13798951 | 13805316 | − | gene_id “NFAT_NG41”; transcript_id |
| | | | | | “NFAT_NG41.9”; exon “3”; |
| chr19 | transcript | 13805638 | 13813987 | − | gene_id “NFAT_NG41”; transcript_id |
| | | | | | “NFAT_NG41.11”; RPKM “3.8037”; cov |
| | | | | | “52.6811”; |
| chr19 | exon | 13805638 | 13813987 | − | gene_id “NFAT_NG41”; transcript_id |
| | | | | | “NFAT_NG41.11”; exon “1”; |
| chr19 | transcript | 13805638 | 13818383 | − | gene_id “NFAT_NG41”; transcript_id |
| | | | | | “NFAT_NG41.12”; RPKM “1.6994”; cov |
| | | | | | “23.5360”; |
| chr19 | exon | 13805638 | 13808777 | − | gene_id “NFAT_NG41”; transcript_id |
| | | | | | “NFAT_NG41.12”; exon “1”; |
| chr19 | exon | 13815689 | 13815806 | − | gene_id “NFAT_NG41”; transcript_id |
| | | | | | “NFAT_NG41.12”; exon “2”; |
| chr19 | exon | 13816006 | 13818383 | − | gene_id “NFAT_NG41”; transcript_id |
| | | | | | “NFAT_NG41.12”; exon “3”; |
| chr19 | transcript | 13815247 | 13835941 | − | gene_id “NFAT_NG41”; transcript_id |
| | | | | | “NFAT_NG41.6”; RPKM “1.3817”; cov |
| | | | | | “19.1371”; |
| chr19 | exon | 13815247 | 13815806 | − | gene_id “NFAT_NG41”; transcript_id |
| | | | | | “NFAT_NG41.6”; exon “1”; |
| chr19 | exon | 13823325 | 13823486 | − | gene_id “NFAT_NG41”; transcript_id |
| | | | | | “NFAT_NG41.6”; exon “2”; |
| chr19 | exon | 13835733 | 13835941 | − | gene_id “NFAT_NG41”; transcript_id |
| | | | | | “NFAT_NG41.6”; exon “3”; |
| chr19 | transcript | 13815247 | 13824618 | − | gene_id “NFAT_NG41”; transcript_id |
| | | | | | “NFAT_NG41.8”; RPKM “1.1501”; cov |
| | | | | | “15.9294”; |
| chr19 | exon | 13815247 | 13815806 | − | gene_id “NFAT_NG41”; transcript_id |
| | | | | | “NFAT_NG41.8”; exon “1”; |
| chr19 | exon | 13823325 | 13824618 | − | gene_id “NFAT_NG41”; transcript_id |
| | | | | | “NFAT_NG41.8”; exon “2”; |
| chr19 | transcript | 13815247 | 13835941 | − | gene_id “NFAT_NG41”; transcript_id |
| | | | | | “NFAT_NG41.14”; RPKM “1.1135”; cov |
| | | | | | “15.4213”; |
| chr19 | exon | 13815247 | 13823229 | − | gene_id “NFAT_NG41”; transcript_id |
| | | | | | “NFAT_NG41.14”; exon “1”; |
| chr19 | exon | 13823325 | 13823486 | − | gene_id “NFAT_NG41”; transcript_id |
| | | | | | “NFAT_NG41.14”; exon “2”; |
| chr19 | exon | 13835098 | 13835219 | − | gene_id “NFAT_NG41”; transcript_id |
| | | | | | “NFAT_NG41.14”; exon “3”; |
| chr19 | exon | 13835733 | 13835941 | − | gene_id “NFAT_NG41”; transcript_id |
| | | | | | “NFAT_NG41.14”; exon “4”; |
| chr19 | transcript | 13818392 | 13835941 | − | gene_id “NFAT_NG41”; transcript_id |
| | | | | | “NFAT_NG41.15”; RPKM “0.9362”; cov |
| | | | | | “12.9659”; |
| chr19 | exon | 13818392 | 13823229 | − | gene_id “NFAT_NG41”; transcript_id |
| | | | | | “NFAT_NG41.15”; exon “1”; |
| chr1 9 | exon | 13823325 | 13823486 | − | gene id “NFAT_NG41”; transcript_id |
| | | | | | “NFAT_NG41.15”; exon “2”; |
| chr19 | exon | 13825184 | 13825247 | − | gene_id “NFAT_NG41”; transcript_id |
| | | | | | “NFAT_NG41.15”; exon “3”; |
| chr19 | exon | 13827990 | 13828053 | − | gene_id “NFAT_NG41”; transcript_id |
| | | | | | “NFAT_NG41.15”; exon “4”; |
| chr19 | exon | 13835098 | 13835219 | − | gene_id “NFAT_NG41”; transcript_id |
| | | | | | “NFAT_NG41.15”; exon “5”; |
| chr19 | exon | 13835733 | 13835941 | − | gene_id “NFAT_NG41”; transcript_id |
| | | | | | “NFAT_NG41.15”; exon “6”; |
| chr19 | transcript | 13818392 | 13825176 | − | gene_id “NFAT_NG41”; transcript_id |
| | | | | | “NFAT_NG41.7”; RPKM “2.3998”; cov |
| | | | | | “33.2371”; |
| chr19 | exon | 13818392 | 13823229 | − | gene_id “NFAT_NG41”; transcript_id |
| | | | | | “NFAT_NG41.7”; exon “1”; |
| chr19 | exon | 13823325 | 13823486 | − | gene_id “NFAT_NG41”; transcript_id |
| | | | | | “NFAT_NG41.7”; exon “2”; |
| chr19 | exon | 13823805 | 13825176 | − | gene_id “NFAT_NG41”; transcript_id |
| | | | | | “NFAT_NG41.7”; exon “3”; |
| chr19 | transcript | 13818392 | 13835941 | − | gene_id “NFAT_NG41”; transcript_id |
| | | | | | “NFAT_NG41.10”; RPKM “2.4982”; cov |
| | | | | | “34.5998”; |
| chr19 | exon | 13818392 | 13824781 | − | gene_id “NFAT_NG41”; transcript_id |
| | | | | | “NFAT_NG41.10”; exon “1”; |
| chr19 | exon | 13825184 | 13825247 | − | gene_id “NFAT_NG41”; transcript_id |
| | | | | | “NFAT_NG41.10”; exon “2”; |
| chr19 | exon | 13827990 | 13828053 | − | gene_id “NFAT_NG41”; transcript_id |
| | | | | | “NFAT_NG41.10”; exon “3”; |
| chr19 | exon | 13835098 | 13835219 | − | gene_id “NFAT_NG41”; transcript_id |
| | | | | | “NFAT_NG41.10”; exon “4”; |
| chr19 | exon | 13835733 | 13835941 | − | gene_id “NFAT_NG41”; transcript_id |
| | | | | | “NFAT_NG41.10”; exon “5”; |
| chr19 | transcript | 13824639 | 13835941 | − | gene_id “NFAT_NG41”; transcript_id |
| | | | | | “NFAT_NG41.4”; RPKM “1.1554”; cov |
| | | | | | “16.0026”; |
| chr19 | exon | 13824639 | 13824781 | − | gene_id “NFAT_NG41”; transcript_id |
| | | | | | “NFAT_NG41.4”; exon “1”; |
| chr19 | exon | 13825184 | 13825247 | − | gene_id “NFAT_NG41”; transcript_id |
| | | | | | “NFAT_NG41.4”; exon “2”; |
| chr19 | exon | 13835098 | 13835219 | − | gene_id “NFAT_NG41”; transcript_id |
| | | | | | “NFAT_NG41.4”; exon “3”; |
| chr19 | exon | 13835733 | 13835941 | − | gene_id “NFAT_NG41”; transcript_id |
| | | | | | “NFAT_NG41.4”; exon “4”; |
| chr19 | transcript | 13826505 | 13828691 | − | gene_id “NFAT_NG41”; transcript_id |
| | | | | | “NFAT_NG41.3”; RPKM “2.2391”; cov |
| | | | | | “31.0114”; |
| chr19 | exon | 13826505 | 13828691 | − | gene_id “NFAT_NG41”; transcript_id |
| | | | | | “NFAT_NG41.3”; exon “1”; |
| chr19 | transcript | 13834709 | 13835941 | − | gene_id “NFAT_NG41”; transcript_id |
| | | | | | “NFAT_NG41.5”; RPKM “1.8692”; cov |
| | | | | | “25.8888”; |
| chr19 | exon | 13834709 | 13835219 | − | gene_id “NFAT_NG41”; transcript_id |
| | | | | | “NFAT_NG41.5”; exon “1”; |
| chr19 | exon | 13835733 | 13835941 | − | gene_id “NFAT_NG41”; transcript_id |
| | | | | | “NFAT_NG41.5”; exon “2”; |
| chr2 | transcript | 45683440 | 45730602 | + | gene_id “NFAT_NG6”; transcript_id |
| | | | | | “NFAT_NG6.1”; RPKM “0.9316”; cov |
| | | | | | “12.9030”; |
| chr2 | exon | 45683440 | 45683520 | + | gene_id “NFAT_NG6”; transcript_id |
| | | | | | “NFAT_NG6.1”; exon “1”; |
| chr2 | exon | 45730420 | 45730602 | + | gene_id “NFAT_NG6”; transcript_id |
| | | | | | “NFAT_NG6.1”; exon “2”; |
| chr2 | transcript | 45683440 | 45730602 | + | gene_id “NFAT_NG6”; transcript_id |
| | | | | | “NFAT_NG6.2”; RPKM “1.2417”; cov |
| | | | | | “17.1967”; |
| chr2 | exon | 45683440 | 45683520 | + | gene_id “NFAT_NG6”; transcript_id |
| | | | | | “NFAT_NG6.2”; exon “1”; |
| chr2 | exon | 45712323 | 45712399 | + | gene_id “NFAT_NG6”; transcript_id |
| | | | | | “NFAT_NG6.2”; exon “2”; |
| chr2 | exon | 45730420 | 45730602 | + | gene_id “NFAT_NG6”; transcript_id |
| | | | | | “NFAT_NG6.2”; exon “3”; |
| chr2 | transcript | 101255231 | 101270778 | − | gene_id “NFAT_NG7”; transcript_id |
| | | | | | “NFAT_NG7.1”; RPKM “1.7283”; cov |
| | | | | | “23.9365”; |
| chr2 | exon | 101255231 | 101258063 | − | gene_id “NFAT_NG7”; transcript_id |
| | | | | | “NFAT_NG7.1”; exon “1”; |
| chr2 | exon | 101262704 | 101262761 | − | gene_id “NFAT_NG7”; transcript_id |
| | | | | | “NFAT_NG7.1”; exon “2”; |
| chr2 | exon | 101268370 | 101268451 | − | gene_id “NFAT_NG7”; transcript_id |
| | | | | | “NFAT_NG7.1”; exon “3”; |
| chr2 | exon | 101268970 | 101269081 | − | gene_id “NFAT_NG7”; transcript_id |
| | | | | | “NFAT_NG7.1”; exon “4”; |
| chr2 | exon | 101269594 | 101270778 | − | gene_id “NFAT_NG7”; transcript_id |
| | | | | | “NFAT_NG7.1”; exon “5”; |
| chr2 | transcript | 101255231 | 101359466 | − | gene_id “NFAT_NG7”; transcript_id |
| | | | | | “NFAT_NG7.2”; RPKM “1.3501”; cov |
| | | | | | “18.6990”; |
| chr2 | exon | 101255231 | 101258063 | − | gene_id “NFAT_NG7”; transcript_id |
| | | | | | “NFAT_NG7.2”; exon “1”; |
| chr2 | exon | 101262704 | 101262761 | − | gene_id “NFAT_NG7”; transcript_id |
| | | | | | “NFAT_NG7.2”; exon “2”; |
| chr2 | exon | 101268370 | 101269081 | − | gene_id “NFAT_NG7”; transcript_id |
| | | | | | “NFAT_NG7.2”; exon “3”; |
| chr2 | exon | 101269594 | 101269721 | − | gene_id “NFAT_NG7”; transcript_id |
| | | | | | “NFAT_NG7.2”; exon “4”; |
| chr2 | exon | 101359253 | 101359466 | − | gene_id “NFAT_NG7”; transcript_id |
| | | | | | “NFAT_NG7.2”; exon “5”; |
| chr2 | transcript | 198028367 | 198055139 | + | gene_id “NFAT_NG8”; transcript_id |
| | | | | | “NFAT_NG8.1”; RPKM “2.0569”; cov |
| | | | | | “28.4884”; |
| chr2 | exon | 198028367 | 198029989 | + | gene_id “NFAT_NG8”; transcript_id |
| | | | | | “NFAT_NG8.1”; exon “1”; |
| chr2 | exon | 198051611 | 198051897 | + | gene_id “NFAT_NG8”; transcript_id |
| | | | | | “NFAT_NG8.1”; exon “2”; |
| chr2 | exon | 198052444 | 198055139 | + | gene_id “NFAT_NG8”; transcript_id |
| | | | | | “NFAT_NG8.1”; exon “3”; |
| chr2 | transcript | 198028367 | 198055139 | + | gene_id “NFAT_NG8”; transcript_id |
| | | | | | “NFAT_NG8.2”; RPKM “1.2755”; cov |
| | | | | | “17.6651”; |
| chr2 | exon | 198028367 | 198028669 | + | gene_id “NFAT_NG8”; transcript_id |
| | | | | | “NFAT_NG8.2”; exon “1”; |
| chr2 | exon | 198029918 | 198029989 | + | gene_id “NFAT_NG8”; transcript_id |
| | | | | | “NFAT_NG8.2”; exon “2”; |
| chr2 | exon | 198051611 | 198051671 | + | gene_id “NFAT_NG8”; transcript_id |
| | | | | | “NFAT_NG8.2”; exon “3”; |
| chr2 | exon | 198051767 | 198051897 | + | gene_id “NFAT_NG8”; transcript_id |
| | | | | | “NFAT_NG8.2”; exon “4”; |
| chr2 | exon | 198052444 | 198055139 | + | gene_id “NFAT_NG8”; transcript_id |
| | | | | | “NFAT_NG8.2”; exon “5”; |
| chr2 | transcript | 198028367 | 198055139 | + | gene_id “NFAT_NG8”; transcript_id |
| | | | | | “NFAT_NG8.3”; RPKM “1.4057”; cov |
| | | | | | “19.4689”; |
| chr2 | exon | 198028367 | 198042181 | + | gene_id “NFAT_NG8”; transcript_id |
| | | | | | “NFAT_NG8.3”; exon “1”; |
| chr2 | exon | 198043262 | 198043392 | + | gene_id “NFAT_NG8”; transcript_id |
| | | | | | “NFAT_NG8.3”; exon “2”; |
| chr2 | exon | 198051611 | 198051897 | + | gene_id “NFAT_NG8”; transcript_id |
| | | | | | “NFAT_NG8.3”; exon “3”; |
| chr2 | exon | 198052444 | 198055139 | + | gene_id “NFAT_NG8”; transcript_id |
| | | | | | “NFAT_NG8.3”; exon “4”; |
| chr2 | transcript | 198028367 | 198055139 | + | gene_id “NFAT_NG8”; transcript_id |
| | | | | | “NFAT_NG8.4”; RPKM “0.7892”; cov |
| | | | | | “10.9298”; |
| chr2 | exon | 198028367 | 198042181 | + | gene_id “NFAT_NG8”; transcript_id |
| | | | | | “NFAT_NG8.4”; exon “1”; |
| chr2 | exon | 198051611 | 198051897 | + | gene_id “NFAT_NG8”; transcript_id |
| | | | | | “NFAT_NG8.4”; exon “2”; |
| chr2 | exon | 198052444 | 198055139 | + | gene_id “NFAT_NG8”; transcript_id |
| | | | | | “NFAT_NG8.4”; exon “3”; |
| chr2 | transcript | 198028367 | 198055139 | + | gene_id “NFAT_NG8”; transcript_id |
| | | | | | “NFAT_NG8.5”; RPKM “1.0391”; cov |
| | | | | | “14.3920”; |
| chr2 | exon | 198028367 | 198042181 | + | gene_id “NFAT_NG8”; transcript_id |
| | | | | | “NFAT_NG8.5”; exon “1”; |
| chr2 | exon | 198051611 | 198051671 | + | gene_id “NFAT_NG8”; transcript_id |
| | | | | | “NFAT_NG8.5”; exon “2”; |
| chr2 | exon | 198051767 | 198051897 | + | gene_id “NFAT_NG8”; transcript_id |
| | | | | | “NFAT_NG8.5”; exon “3”; |
| chr2 | exon | 198052444 | 198055139 | + | gene_id “NFAT_NG8”; transcript_id |
| | | | | | “NFAT_NG8.5”; exon “4”; |
| chr2 | transcript | 238353802 | 238357577 | − | gene_id “NFAT_NG9”; transcript_id |
| | | | | | “NFAT_NG9.1”; RPKM “2.7658”; cov |
| | | | | | “38.3058”; |
| chr2 | exon | 238353802 | 238357577 | − | gene_id “NFAT_NG9”; transcript_id |
| | | | | | “NFAT_NG9.1”; exon “1”; |
| chr20 | transcript | 37227074 | 37230330 | − | gene_id “NFAT_NG42”; transcript_id |
| | | | | | “NFAT_NG42.1”; RPKM “0.7901”; cov |
| | | | | | “10.9434”; |
| chr20 | exon | 37227074 | 37227273 | − | gene_id “NFAT_NG42”; transcript_id |
| | | | | | “NFAT_NG42.1”; exon “1”; |
| chr20 | exon | 37228492 | 37230330 | − | gene_id “NFAT_NG42”; transcript_id |
| | | | | | “NFAT_NG42.1”; exon “2”; |
| chr20 | transcript | 37227074 | 37230330 | − | gene_id “NFAT_NG42”; transcript_id |
| | | | | | “NFAT_NG42.2”; RPKM “1.6120”; cov |
| | | | | | “22.3256”; |
| chr20 | exon | 37227074 | 37230330 | − | gene_id “NFAT_NG42”; transcript_id |
| | | | | | “NFAT_NG42.2”; exon “1”; |
| chr20 | transcript | 44546832 | 44557544 | + | gene_id “NFAT_NG43”; transcript_id |
| | | | | | “NFAT_NG43.1”; RPKM “14.7633”; cov |
| | | | | | “204.4700”; |
| chr20 | exon | 44546832 | 44547056 | + | gene_id “NFAT_NG43”; transcript_id |
| | | | | | “NFAT_NG43.1”; exon “1”; |
| chr20 | exon | 44548365 | 44557544 | + | gene_id “NFAT_NG43”; transcript_id |
| | | | | | “NFAT_NG43.1”; exon “2”; |
| chr20 | transcript | 47523284 | 47523755 | + | gene_id “NFAT_NG44”; transcript_id |
| | | | | | “NFAT_NG44.1”; RPKM “12.4721”; cov |
| | | | | | “172.7373”; |
| chr20 | exon | 47523284 | 47523755 | + | gene_id “NFAT_NG44”; transcript_id |
| | | | | | “NFAT_NG44.1”; exon “1”; |
| chr20 | transcript | 47957753 | 47960887 | + | gene_id “NFAT_NG45”; transcript_id |
| | | | | | “NFAT_NG45.1”; RPKM “5.1391”; cov |
| | | | | | “71.1756”; |
| chr20 | exon | 47957753 | 47960887 | + | gene_id “NFAT_NG45”; transcript_id |
| | | | | | “NFAT_NG45.1”; exon “1”; |
| chr21 | transcript | 43476107 | 43477132 | − | gene_id “NFAT_NG46”; transcript_id |
| | | | | | “NFAT_NG46.1”; RPKM “4.7532”; cov |
| | | | | | “65.8307”; |
| chr21 | exon | 43476107 | 43477132 | − | gene_id “NFAT_NG46”; transcript_id |
| | | | | | “NFAT_NG46.1”; exon “1”; |
| chr3 | transcript | 134098263 | 134106446 | − | gene_id “NFAT_NG10”; transcript_id |
| | | | | | “NFAT_NG10.1”; RPKM “1.9791”; cov |
| | | | | | “27.4104”; |
| chr3 | exon | 134098263 | 134106446 | − | gene_id “NFAT_NG10”; transcript_id |
| | | | | | “NFAT_NG10.1”; exon “1”; |
| chr3 | transcript | 134098263 | 134112901 | − | gene_id “NFAT_NG10”; transcript_id |
| | | | | | “NFAT_NG10.2”; RPKM “2.1210”; cov |
| | | | | | “29.3757”; |
| chr3 | exon | 134098263 | 134101497 | − | gene_id “NFAT_NG10”; transcript_id |
| | | | | | “NFAT_NG10.2”; exon “1”; |
| chr3 | exon | 134112482 | 134112901 | − | gene_id “NFAT_NG10”; transcript_id |
| | | | | | “NFAT_NG10.2”; exon “2”; |
| chr4 | transcript | 42153350 | 42241350 | + | gene_id “NFAT_NG11”; transcript_id |
| | | | | | “NFAT_NG11.1”; RPKM “1.1726”; cov |
| | | | | | “16.2401”; |
| chr4 | exon | 42153350 | 42153580 | + | gene_id “NFAT_NG11”; transcript_id |
| | | | | | “NFAT_NG11.1”; exon “1”; |
| chr4 | exon | 42240711 | 42241350 | + | gene_id “NFAT_NG11”; transcript_id |
| | | | | | “NFAT_NG11.1”; exon “2”; |
| chr4 | transcript | 42234509 | 42241350 | + | gene_id “NFAT_NG11”; transcript_id |
| | | | | | “NFAT_NG11.2”; RPKM “3.8366”; cov |
| | | | | | “53.1359”; |
| chr4 | exon | 42234509 | 42234675 | + | gene_id “NFAT_NG11”; transcript_id |
| | | | | | “NFAT_NG11.2”; exon “1”; |
| chr4 | exon | 42240711 | 42241350 | + | gene_id “NFAT_NG11”; transcript_id |
| | | | | | “NFAT_NG11.2”; exon “2”; |
| chr4 | transcript | 42234509 | 42241350 | + | gene_id “NFAT_NG11”; transcript_id |
| | | | | | “NFAT_NG11.3”; RPKM “0.7633”; cov |
| | | | | | “10.5714”; |
| chr4 | exon | 42234509 | 42234675 | + | gene_id “NFAT_NG11”; transcript_id |
| | | | | | “NFAT_NG11.3”; exon “1”; |
| chr4 | exon | 42236179 | 42236293 | + | gene_id “NFAT_NG11”; transcript_id |
| | | | | | “NFAT_NG11.3”; exon “2”; |
| chr4 | exon | 42240711 | 42241350 | + | gene_id “NFAT_NG11”; transcript_id |
| | | | | | “NFAT_NG11.3”; exon “3”; |
| chr4 | transcript | 150065027 | 150065608 | + | gene_id “NFAT_NG12”; transcript_id |
| | | | | | “NFAT_NG12.1”; RPKM “6.0835”; cov |
| | | | | | “84.2560”; |
| chr4 | exon | 150065027 | 150065608 | + | gene_id “NFAT_NG12”; transcript_id |
| | | | | | “NFAT_NG12.1”; exon “1”; |
| chr4 | transcript | 184483153 | 184483751 | + | gene_id “NFAT_NG13”; transcript_id |
| | | | | | “NFAT_NG13.1”; RPKM “2.0545”; cov |
| | | | | | “28.4545”; |
| chr4 | exon | 184483153 | 184483751 | + | gene_id “NFAT_NG13”; transcript_id |
| | | | | | “NFAT_NG13.1”; exon “1”; |
| chr4 | transcript | 184483153 | 184490910 | + | gene_id “NFAT_NG13”; transcript_id |
| | | | | | “NFAT_NG13.2”; RPKM “1.0838”; cov |
| | | | | | “15.0099”; |
| chr4 | exon | 184483153 | 184483416 | + | gene_id “NFAT_NG13”; transcript_id |
| | | | | | “NFAT_NG13.2”; exon “1”; |
| chr4 | exon | 184485161 | 184490910 | + | gene_id “NFAT_NG13”; transcript_id |
| | | | | | “NFAT_NG13.2”; exon “2”; |
| chr5 | transcript | 127530275 | 127547812 | − | gene_id “NFAT_NG14”; transcript_id |
| | | | | | “NFAT_NG14.2”; RPKM “7.6426”; cov |
| | | | | | “105.8495”; |
| chr5 | exon | 127530275 | 127537771 | − | gene_id “NFAT_NG14”; transcript_id |
| | | | | | “NFAT_NG14.2”; exon “1”; |
| chr5 | exon | 127543631 | 127543759 | − | gene_id “NFAT_NG14”; transcript_id |
| | | | | | “NFAT_NG14.2”; exon “2”; |
| chr5 | exon | 127547699 | 127547812 | − | gene_id “NFAT_NG14”; transcript_id |
| | | | | | “NFAT_NG14.2”; exon “3”; |
| chr5 | transcript | 127530275 | 127547812 | − | gene_id “NFAT_NG14”; transcript_id |
| | | | | | “NFAT_NG14.3”; RPKM “21.1724”; cov |
| | | | | | “293.2362”; |
| chr5 | exon | 127530275 | 127537414 | − | gene_id “NFAT_NG14”; transcript_id |
| | | | | | “NFAT_NG14.3”; exon “1”; |
| chr5 | exon | 127537619 | 127537771 | − | gene_id “NFAT_NG14”; transcript_id |
| | | | | | “NFAT_NG14.3”; exon “2”; |
| chr5 | exon | 127543631 | 127543759 | − | gene_id “NFAT_NG14”; transcript_id |
| | | | | | “NFAT_NG14.3”; exon “3”; |
| chr5 | exon | 127547699 | 127547812 | − | gene_id “NFAT_NG14”; transcript_id |
| | | | | | “NFAT_NG14.3”; exon “4”; |
| chr5 | transcript | 127530275 | 127547812 | − | gene_id “NFAT_NG14”; transcript_id |
| | | | | | “NFAT_NG14.4”; RPKM “2.7836”; cov |
| | | | | | “38.5520”; |
| chr5 | exon | 127530275 | 127537467 | − | gene_id “NFAT_NG14”; transcript_id |
| | | | | | “NFAT_NG14.4”; exon “1”; |
| chr5 | exon | 127537619 | 127537771 | − | gene_id “NFAT_NG14”; transcript_id |
| | | | | | “NFAT_NG14.4”; exon “2”; |
| chr5 | exon | 127543631 | 127543759 | − | gene_id “NFAT_NG14”; transcript_id |
| | | | | | “NFAT_NG14.4”; exon “3”; |
| chr5 | exon | 127547699 | 127547812 | − | gene_id “NFAT_NG14”; transcript_id |
| | | | | | “NFAT_NG14.4”; exon “4”; |
| chr5 | transcript | 127530275 | 127547812 | − | gene_id “NFAT_NG14”; transcript_id |
| | | | | | “NFAT_NG14.1”; RPKM “0.8567”; cov |
| | | | | | “11.8649”; |
| chr5 | exon | 127530275 | 127537414 | − | gene_id “NFAT_NG14”; transcript_id |
| | | | | | “NFAT_NG14.1”; exon “1”; |
| chr5 | exon | 127537619 | 127537786 | − | gene_id “NFAT_NG14”; transcript_id |
| | | | | | “NFAT_NG14.1”; exon “2”; |
| chr5 | exon | 127543631 | 127543759 | − | gene_id “NFAT_NG14”; transcript_id |
| | | | | | “NFAT_NG14.1”; exon “3”; |
| chr5 | exon | 127547699 | 127547812 | − | gene_id “NFAT_NG14”; transcript_id |
| | | | | | “NFAT_NG14.1”; exon “4”; |
| chr5 | transcript | 127527055 | 127530260 | − | gene_id “NFAT_NG15”; transcript_id |
| | | | | | “NFAT_NG15.1”; RPKM “4.3381”; cov |
| | | | | | “60.0823”; |
| chr5 | exon | 127527055 | 127530260 | − | gene_id “NFAT_NG15”; transcript_id |
| | | | | | “NFAT_NG15.1”; exon “1”; |
| chr5 | transcript | 173943485 | 174000176 | − | gene_id “NFAT_NG16”; transcript_id |
| | | | | | “NFAT_NG16.1”; RPKM “0.9706”; cov |
| | | | | | “13.4421”; |
| chr5 | exon | 173943485 | 173944076 | − | gene_id “NFAT_NG16”; transcript_id |
| | | | | | “NFAT_NG16.1”; exon “1”; |
| chr5 | exon | 174000005 | 174000176 | − | gene_id “NFAT_NG16”; transcript_id |
| | | | | | “NFAT_NG16.1”; exon “2”; |
| chr6 | transcript | 95830544 | 95833565 | + | gene_id “NFAT_NG17”; transcript_id |
| | | | | | “NFAT_NG17.1”; RPKM “4.7975”; cov |
| | | | | | “66.4447”; |
| chr6 | exon | 95830544 | 95833565 | + | gene_id “NFAT_NG17”; transcript_id |
| | | | | | “NFAT_NG17.1”; exon “1”; |
| chr6 | transcript | 95892635 | 95896748 | + | gene_id “NFAT_NG18”; transcript_id |
| | | | | | “NFAT_NG18.2”; RPKM “1.1184”; cov |
| | | | | | “15.4898”; |
| chr6 | exon | 95892635 | 95893251 | + | gene_id “NFAT_NG18”; transcript_id |
| | | | | | “NFAT_NG18.2”; exon “1”; |
| chr6 | exon | 95893369 | 95893551 | + | gene_id “NFAT_NG18”; transcript_id |
| | | | | | “NFAT_NG18.2”; exon “2”; |
| chr6 | exon | 95896077 | 95896748 | + | gene_id “NFAT_NG18”; transcript_id |
| | | | | | “NFAT_NG18.2”; exon “3”; |
| chr6 | transcript | 95912884 | 95915515 | + | gene_id “NFAT_NG18”; transcript_id |
| | | | | | “NFAT_NG18.1”; RPKM “1.8439”; cov |
| | | | | | “25.5380”; |
| chr6 | exon | 95912884 | 95915515 | + | gene_id “NFAT_NG18”; transcript_id |
| | | | | | “NFAT_NG18.1”; exon “1”; |
| chr6 | transcript | 107389053 | 107394010 | + | gene_id “NFAT_NG19”; transcript_id |
| | | | | | “NFAT_NG19.1”; RPKM “1.9609”; cov |
| | | | | | “27.1578”; |
| chr6 | exon | 107389053 | 107389369 | + | gene_id “NFAT_NG19”; transcript_id |
| | | | | | “NFAT_NG19.1”; exon “1”; |
| chr6 | exon | 107389938 | 107394010 | + | gene_id “NFAT_NG19”; transcript_id |
| | | | | | “NFAT_NG19.1”; exon “2”; |
| chr6 | transcript | 107389053 | 107394010 | + | gene_id “NFAT_NG19”; transcript_id |
| | | | | | “NFAT_NG19.2”; RPKM “1.8672”; cov |
| | | | | | “25.8601”; |
| chr6 | exon | 107389053 | 107394010 | + | gene_id “NFAT_NG19”; transcript_id |
| | | | | | “NFAT_NG19.2”; exon “1”; |
| chr6 | transcript | 148520686 | 148521133 | + | gene_id “NFAT_NG20”; transcript_id |
| | | | | | “NFAT_NG20.1”; RPKM “1.7504”; cov |
| | | | | | “24.2433”; |
| chr6 | exon | 148520686 | 148521133 | + | gene_id “NFAT_NG20”; transcript_id |
| | | | | | “NFAT_NG20.1”; exon “1”; |
| chr7 | transcript | 101241162 | 101248766 | − | gene_id “NFAT_NG21”; transcript_id |
| | | | | | “NFAT_NG21.2”; RPKM “1.3389”; cov |
| | | | | | “18.5436”; |
| chr7 | exon | 101241162 | 101245578 | − | gene_id “NFAT_NG21”; transcript_id |
| | | | | | “NFAT_NG21.2”; exon “1”; |
| chr7 | exon | 101248543 | 101248766 | − | gene_id “NFAT_NG21”; transcript_id |
| | | | | | “NFAT_NG21.2”; exon “2”; |
| chr7 | transcript | 101248290 | 101248766 | − | gene_id “NFAT_NG21”; transcript_id |
| | | | | | “NFAT_NG21.1”; RPKM “2.1601”; cov |
| | | | | | “29.9176”; |
| chr7 | exon | 101248290 | 101248766 | − | gene_id “NFAT_NG21”; transcript_id |
| | | | | | “NFAT_NG21.1”; exon “1”; |
| chr7 | transcript | 134053526 | 134059044 | − | gene_id “NFAT_NG22”; transcript_id |
| | | | | | “NFAT_NG22.1”; RPKM “0.8111”; cov |
| | | | | | “11.2330”; |
| chr7 | exon | 134053526 | 134054296 | − | gene_id “NFAT_NG22”; transcript_id |
| | | | | | “NFAT_NG22.1”; exon “1”; |
| chr7 | exon | 134055467 | 134055670 | − | gene_id “NFAT_NG22”; transcript_id |
| | | | | | “NFAT_NG22.1”; exon “2”; |
| chr7 | exon | 134056097 | 134056272 | − | gene_id “NFAT_NG22”; transcript_id |
| | | | | | “NFAT_NG22.1”; exon “3”; |
| chr7 | exon | 134057814 | 134059044 | − | gene_id “NFAT_NG22”; transcript_id |
| | | | | | “NFAT_NG22.1”; exon “4”; |
| chr7 | transcript | 134301798 | 134322444 | − | gene_id “NFAT_NG23”; transcript_id |
| | | | | | “NFAT_NG23.2”; RPKM “4.1677”; cov |
| | | | | | “57.7223”; |
| chr7 | exon | 134301798 | 134304700 | − | gene_id “NFAT_NG23”; transcript_id |
| | | | | | “NFAT_NG23.2”; exon “1”; |
| chr7 | exon | 134321927 | 134322444 | − | gene_id “NFAT_NG23”; transcript_id |
| | | | | | “NFAT_NG23.2”; exon “2”; |
| chr7 | transcript | 134320932 | 134322444 | − | gene_id “NFAT_NG23”; transcript_id |
| | | | | | “NFAT_NG23.1”; RPKM “3.2531”; cov |
| | | | | | “45.0554”; |
| chr7 | exon | 134320932 | 134322444 | − | gene_id “NFAT_NG23”; transcript_id |
| | | | | | “NFAT_NG23.1”; exon “1”; |
| chr8 | transcript | 6663895 | 6670084 | + | gene_id “NFAT_NG24”; transcript_id |
| | | | | | “NFAT_NG24.1”; RPKM “1.7246”; cov |
| | | | | | “23.8854”; |
| chr8 | exon | 6663895 | 6664534 | + | gene_id “NFAT_NG24”; transcript_id |
| | | | | | “NFAT_NG24.1”; exon “1”; |
| chr8 | exon | 6664559 | 6666952 | + | gene_id “NFAT_NG24”; transcript_id |
| | | | | | “NFAT_NG24.1”; exon “2”; |
| chr8 | exon | 6668584 | 6670084 | + | gene_id “NFAT_NG24”; transcript_id |
| | | | | | “NFAT_NG24.1”; exon “3”; |
| chr8 | transcript | 6663895 | 6670084 | + | gene_id “NFAT_NG24”; transcript_id |
| | | | | | “NFAT_NG24.2”; RPKM “1.3166”; cov |
| | | | | | “18.2351”; |
| chr8 | exon | 6663895 | 6666952 | + | gene_id “NFAT_NG24”; transcript_id |
| | | | | | “NFAT_NG24.2”; exon “1”; |
| chr8 | exon | 6668584 | 6670084 | + | gene_id “NFAT_NG24”; transcript_id |
| | | | | | “NFAT_NG24.2”; exon “2”; |
| chr8 | transcript | 23450381 | 23528450 | + | gene_id “NFAT_NG25”; transcript_id |
| | | | | | “NFAT_NG25.2”; RPKM “2.3581”; cov |
| | | | | | “32.6593”; |
| chr8 | exon | 23450381 | 23450576 | + | gene_id “NFAT_NG25”; transcript_id |
| | | | | | “NFAT_NG25.2”; exon “1”; |
| chr8 | exon | 23523018 | 23523115 | + | gene_id “NFAT_NG25”; transcript_id |
| | | | | | “NFAT_NG25.2”; exon “2”; |
| chr8 | exon | 23526156 | 23528450 | + | gene_id “NFAT_NG25”; transcript_id |
| | | | | | “NFAT_NG25.2”; exon “3”; |
| chr8 | transcript | 23731395 | 23735163 | + | gene_id “NFAT_NG25”; transcript_id |
| | | | | | “NFAT_NG25.1”; RPKM “3.9569”; cov |
| | | | | | “54.8028”; |
| chr8 | exon | 23731395 | 23735163 | + | gene_id “NFAT_NG25”; transcript_id |
| | | | | | “NFAT_NG25.1”; exon “1”; |
| chr8 | transcript | 23657162 | 23663146 | + | gene_id “NFAT_NG26”; transcript_id |
| | | | | | “NFAT_NG26.1”; RPKM “5.4070”; cov |
| | | | | | “74.8857”; |
| chr8 | exon | 23657162 | 23663146 | + | gene_id “NFAT_NG26”; transcript_id |
| | | | | | “NFAT_NG26.1”; exon “1”; |
| chr9 | transcript | 18413705 | 18415691 | − | gene_id “NFAT_NG27”; transcript_id |
| | | | | | “NFAT_NG27.2”; RPKM “2.4870”; cov |
| | | | | | “34.4442”; |
| chr9 | exon | 18413705 | 18415691 | − | gene_id “NFAT_NG27”; transcript_id |
| | | | | | “NFAT_NG27.2”; exon “1”; |
| chr9 | transcript | 18413705 | 18422989 | − | gene_id “NFAT_NG27”; transcript_id |
| | | | | | “NFAT_NG27.3”; RPKM “1.0119”; cov |
| | | | | | “14.0148”; |
| chr9 | exon | 18413705 | 18413849 | − | gene_id “NFAT_NG27”; transcript_id |
| | | | | | “NFAT_NG27.3”; exon “1”; |
| chr9 | exon | 18419419 | 18419454 | − | gene_id “NFAT_NG27”; transcript_id |
| | | | | | “NFAT_NG27.3”; exon “2”; |
| chr9 | exon | 18420593 | 18421081 | − | gene_id “NFAT_NG27”; transcript_id |
| | | | | | “NFAT_NG27.3”; exon “3”; |
| chr9 | exon | 18422664 | 18422989 | − | gene_id “NFAT_NG27”; transcript_id |
| | | | | | “NFAT_NG27.3”; exon “4”; |
| chr9 | transcript | 18419752 | 18422989 | − | gene_id “NFAT_NG27”; transcript_id |
| | | | | | “NFAT_NG27.1”; RPKM “7.6140”; cov |
| | | | | | “105.4533”; |
| chr9 | exon | 18419752 | 18421081 | − | gene_id “NFAT_NG27”; transcript_id |
| | | | | | “NFAT_NG27.1”; exon “1”; |
| chr9 | exon | 18422664 | 18422989 | − | gene_id “NFAT_NG27”; transcript_id |
| | | | | | “NFAT_NG27.1”; exon “2”; |
| chr9 | transcript | 25756141 | 25757060 | − | gene_id “NFAT_NG28”; transcript_id |
| | | | | | “NFAT_NG28.1”; RPKM “9.2744”; cov |
| | | | | | “128.4489”; |
| chr9 | exon | 25756141 | 25757060 | − | gene_id “NFAT_NG28”; transcript_id |
| | | | | | “NFAT_NG28.1”; exon “1”; |
| chr9 | transcript | 104114272 | 104114549 | − | gene_id “NFAT_NG29”; transcript_id |
| | | | | | “NFAT_NG29.1”; RPKM “6.9270”; cov |
| | | | | | “95.9388”; |
| chr9 | exon | 104114272 | 104114549 | − | gene_id “NFAT_NG29”; transcript_id |
| | | | | | “NFAT_NG29.1”; exon “1”; |
| chr9 | transcript | 116980060 | 116996390 | − | gene_id “NFAT_NG30”; transcript_id |
| | | | | | “NFAT_NG30.1”; RPKM “1.0994”; cov |
| | | | | | “15.2270”; |
| chr9 | exon | 116980060 | 116996045 | − | gene_id “NFAT_NG30”; transcript_id |
| | | | | | “NFAT_NG30.1”; exon “1”; |
| chr9 | exon | 116996321 | 116996390 | − | gene_id “NFAT_NG30”; transcript_id |
| | | | | | “NFAT_NG30.1”; exon “2”; |
| chrY | transcript | 26535432 | 26541102 | + | gene_id “NFAT_NG47”; transcript_id |
| | | | | | “NFAT_NG47.1”; RPKM “4.3719”; cov |
| | | | | | “60.5497”; |
| chrY | exon | 26535432 | 26535553 | + | gene_id “NFAT_NG47”; transcript_id |
| | | | | | “NFAT_NG47.1”; exon “1”; |
| chrY | exon | 26540808 | 26541102 | + | gene_id “NFAT_NG47”; transcript_id |
| | | | | | “NFAT_NG47.1”; exon “2”; |
| chr15 | transcript | 70421911 | 70434789 | − | gene_id “SS_NG3”; transcript_id |
| | | | | | “SS_NG3.6”; RPKM “0.7613”; cov |
| | | | | | “12.0951”; |
| chr15 | exon | 70421911 | 70422897 | − | gene_id “SS_NG3”; transcript_id |
| | | | | | “SS_NG3.6”; exon “1”; |
| chr15 | exon | 70423121 | 70423230 | − | gene_id “SS_NG3”; transcript_id |
| | | | | | “SS_NG3.6”; exon “2”; |
| chr15 | exon | 70427598 | 70434789 | − | gene_id “SS_NG3”; transcript_id |
| | | | | | “SS_NG3.6”; exon “3”; |
| chr15 | transcript | 70421911 | 70434789 | − | gene_id “SS_NG3”; transcript_id |
| | | | | | “SS_NG3.5”; RPKM “1.1654”; cov |
| | | | | | “18.5167”; |
| chr15 | exon | 70421911 | 70422897 | − | gene_id “SS_NG3”; transcript_id |
| | | | | | “SS_NG3.5”; exon “1”; |
| chr15 | exon | 70423121 | 70423230 | − | gene_id “SS_NG3”; transcript_id |
| | | | | | “SS_NG3.5”; exon “2”; |
| chr15 | exon | 70430217 | 70434789 | − | gene_id “SS_NG3”; transcript_id |
| | | | | | “SS_NG3.5”; exon “3”; |
| chr15 | transcript | 70421911 | 70878937 | − | gene_id “SS_NG3”; transcript_id |
| | | | | | “SS_NG3.4”; RPKM “1.2170”; cov |
| | | | | | “19.3367”; |
| chr15 | exon | 70421911 | 70422897 | − | gene_id “SS_NG3”; transcript_id |
| | | | | | “SS_NG3.4”; exon “1”; |
| chr15 | exon | 70423121 | 70423230 | − | gene_id “SS_NG3”; transcript_id |
| | | | | | “SS_NG3.4”; exon “2”; |
| chr15 | exon | 70640197 | 70640258 | − | gene_id “SS_NG3”; transcript_id |
| | | | | | “SS_NG3.4”; exon “3”; |
| chr15 | exon | 70878214 | 70878937 | − | gene_id “SS_NG3”; transcript_id |
| | | | | | “SS_NG3.4”; exon “4”; |
| chr15 | transcript | 70421911 | 70878937 | − | gene_id “SS_NG3”; transcript_id |
| | | | | | “SS_NG3.3”; RPKM “1.7942”; cov |
| | | | | | “28.5071”; |
| chr15 | exon | 70421911 | 70422897 | − | gene_id “SS_NG3”; transcript_id |
| | | | | | “SS_NG3.3”; exon “1”; |
| chr15 | exon | 70423121 | 70423230 | − | gene_id “SS_NG3”; transcript_id |
| | | | | | “SS_NG3.3”; exon “2”; |
| chr15 | exon | 70878214 | 70878937 | − | gene_id “SS_NG3”; transcript_id |
| | | | | | “SS_NG3.3”; exon “3”; |
| chr15 | transcript | 70585466 | 70878937 | − | gene_id “SS_NG3”; transcript_id |
| | | | | | “SS_NG3.2”; RPKM “0.9038”; cov |
| | | | | | “14.3600”; |
| chr15 | exon | 70585466 | 70588662 | − | gene_id “SS_NG3”; transcript_id |
| | | | | | “SS_NG3.2”; exon “1”; |
| chr15 | exon | 70640197 | 70640258 | − | gene_id “SS_NG3”; transcript_id |
| | | | | | “SS_NG3.2”; exon “2”; |
| chr15 | exon | 70878214 | 70878937 | − | gene_id “SS_NG3”; transcript_id |
| | | | | | “SS_NG3.2”; exon “3”; |
| chr15 | transcript | 70709440 | 70878937 | − | gene_id “SS_NG3”; transcript_id |
| | | | | | “SS_NG3.1”; RPKM “4.1940”; cov |
| | | | | | “66.6363”; |
| chr15 | exon | 70709440 | 70710841 | − | gene_id “SS_NG3”; transcript_id |
| | | | | | “SS_NG3.1”; exon “1”; |
| chr15 | exon | 70878214 | 70878937 | − | gene_id “SS_NG3”; transcript_id |
| | | | | | “SS_NG3.1”; exon “2”; |
| chr5 | transcript | 124228949 | 124296969 | + | gene_id “SS_NG1”; transcript_id |
| | | | | | “SS_NG1.1”; RPKM “0.9631”; cov |
| | | | | | “15.3022”; |
| chr5 | exon | 124228949 | 124229256 | + | gene_id “SS_NG1”; transcript_id |
| | | | | | “SS_NG1.1”; exon “1”; |
| chr5 | exon | 124286633 | 124286884 | + | gene_id “SS_NG1”; transcript_id |
| | | | | | “SS_NG1.1”; exon “2”; |
| chr5 | exon | 124286977 | 124288649 | + | gene_id “SS_NG1”; transcript_id |
| | | | | | “SS_NG1.1”; exon “3”; |
| chr5 | exon | 124294320 | 124296969 | + | gene_id “SS_NG1”; transcript_id |
| | | | | | “SS_NG1.1”; exon “4”; |
| chr5 | transcript | 124280949 | 124296969 | + | gene_id “SS_NG1”; transcript_id |
| | | | | | “SS_NG1.2”; RPKM “1.0913”; cov |
| | | | | | “17.3396”; |
| chr5 | exon | 124280949 | 124286884 | + | gene_id “SS_NG1”; transcript_id |
| | | | | | “SS_NG1.2”; exon “1”; |
| chr5 | exon | 124286977 | 124288649 | + | gene_id “SS_NG1”; transcript_id |
| | | | | | “SS_NG1.2”; exon “2”; |
| chr5 | exon | 124294320 | 124296969 | + | gene_id “SS_NG1”; transcript_id |
| | | | | | “SS_NG1.2”; exon “3”; |
| chr8 | transcript | 78055063 | 78153568 | + | gene_id “SS_NG2”; transcript_id |
| | | | | | “SS_NG2.8”; RPKM “1.3989”; cov |
| | | | | | “22.2262”; |
| chr8 | exon | 78055063 | 78055362 | + | gene_id “SS_NG2”; transcript_id |
| | | | | | “SS_NG2.8”; exon “1”; |
| chr8 | exon | 78117473 | 78117569 | + | gene_id “SS_NG2”; transcript_id |
| | | | | | “SS_NG2.8”; exon “2”; |
| chr8 | exon | 78120033 | 78120105 | + | gene_id “SS_NG2”; transcript_id |
| | | | | | “SS_NG2.8”; exon “3”; |
| chr8 | exon | 78120459 | 78120563 | + | gene_id “SS_NG2”; transcript_id |
| | | | | | “SS_NG2.8”; exon “4”; |
| chr8 | exon | 78121543 | 78121597 | + | gene_id “SS_NG2”; transcript_id |
| | | | | | “SS_NG2.8”; exon “5”; |
| chr8 | exon | 78124941 | 78127498 | + | gene_id “SS_NG2”; transcript_id |
| | | | | | “SS_NG2.8”; exon “6”; |
| chr8 | exon | 78130820 | 78130871 | + | gene_id “SS_NG2”; transcript_id |
| | | | | | “SS_NG2.8”; exon “7”; |
| chr8 | exon | 78141177 | 78141667 | + | gene_id “SS_NG2”; transcript_id |
| | | | | | “SS_NG2.8”; exon “8”; |
| chr8 | exon | 78147134 | 78148348 | + | gene_id “SS_NG2”; transcript_id |
| | | | | | “SS_NG2.8”; exon “9”; |
| chr8 | exon | 78148841 | 78153568 | + | gene_id “SS_NG2”; transcript_id |
| | | | | | “SS_NG2.8”; exon “10”; |
| chr8 | transcript | 78055063 | 78153568 | + | gene_id “SS_NG2”; transcript_id |
| | | | | | “SS_NG2.7”; RPKM “1.0090”; cov |
| | | | | | “16.0320”; |
| chr8 | exon | 78055063 | 78055362 | + | gene_id “SS_NG2”; transcript_id |
| | | | | | “SS_NG2.7”; exon “1”; |
| chr8 | exon | 78117473 | 78117569 | + | gene_id “SS_NG2”; transcript_id |
| | | | | | “SS_NG2.7”; exon “2”; |
| chr8 | exon | 78120033 | 78120105 | + | gene_id “SS_NG2”; transcript_id |
| | | | | | “SS_NG2.7”; exon “3”; |
| chr8 | exon | 78120459 | 78120563 | + | gene_id “SS_NG2”; transcript_id |
| | | | | | “SS_NG2.7”; exon “4”; |
| chr8 | exon | 78121543 | 78121597 | + | gene_id “SS_NG2”; transcript_id |
| | | | | | “SS_NG2.7”; exon “5”; |
| chr8 | exon | 78124941 | 78127498 | + | gene_id “SS_NG2”; transcript_id |
| | | | | | “SS_NG2.7”; exon “6”; |
| chr8 | exon | 78130820 | 78130871 | + | gene_id “SS_NG2”; transcript_id |
| | | | | | “SS_NG2.7”; exon “7”; |
| chr8 | exon | 78141177 | 78141667 | + | gene_id “SS_NG2”; transcript_id |
| | | | | | “SS_NG2.7”; exon “8”; |
| chr8 | exon | 78147134 | 78149012 | + | gene_id “SS_NG2”; transcript_id |
| | | | | | “SS_NG2.7”; exon “9”; |
| chr8 | exon | 78150146 | 78153568 | + | gene_id “SS_NG2”; transcript_id |
| | | | | | “SS_NG2.7”; exon “10”; |
| chr8 | transcript | 78055063 | 78123090 | + | gene_id “SS_NG2”; transcript_id |
| | | | | | “SS_NG2.6”; RPKM “1.1318”; cov |
| | | | | | “17.9828”; |
| chr8 | exon | 78055063 | 78055362 | + | gene_id “SS_NG2”; transcript_id |
| | | | | | “SS_NG2.6”; exon “1”; |
| chr8 | exon | 78117473 | 78117569 | + | gene_id “SS_NG2”; transcript_id |
| | | | | | “SS_NG2.6”; exon “2”; |
| chr8 | exon | 78120033 | 78120105 | + | gene_id “SS_NG2”; transcript_id |
| | | | | | “SS_NG2.6”; exon “3”; |
| chr8 | exon | 78120459 | 78120563 | + | gene_id “SS_NG2”; transcript_id |
| | | | | | “SS_NG2.6”; exon “4”; |
| chr8 | exon | 78121365 | 78121412 | + | gene_id “SS_NG2”; transcript_id |
| | | | | | “SS_NG2.6”; exon “5”; |
| chr8 | exon | 78121543 | 78123090 | + | gene_id “SS_NG2”; transcript_id |
| | | | | | “SS_NG2.6”; exon “6”; |
| chr8 | transcript | 78055063 | 78100889 | + | gene_id “SS_NG2”; transcript_id |
| | | | | | “SS_NG2.1”; RPKM “1.0720”; cov |
| | | | | | “17.0326”; |
| chr8 | exon | 78055063 | 78055362 | + | gene_id “SS_NG2”; transcript_id |
| | | | | | “SS_NG2.1”; exon “1”; |
| chr8 | exon | 78100600 | 78100889 | + | gene_id “SS_NG2”; transcript_id |
| | | | | | “SS_NG2.1”; exon “2”; |
| chr8 | transcript | 78171057 | 78182416 | + | gene_id “SS_NG2”; transcript_id |
| | | | | | “SS_NG2.2”; RPKM “0.9917”; cov |
| | | | | | “15.7564”; |
| chr8 | exon | 78171057 | 78172951 | + | gene_id “SS_NG2”; transcript_id |
| | | | | | “SS_NG2.2”; exon “1”; |
| chr8 | exon | 78175327 | 78175472 | + | gene_id “SS_NG2”; transcript_id |
| | | | | | “SS_NG2.2”; exon “2”; |
| chr8 | exon | 78176363 | 78176499 | + | gene_id “SS_NG2”; transcript_id |
| | | | | | “SS_NG2.2”; exon “3”; |
| chr8 | exon | 78177038 | 78182416 | + | gene_id “SS_NG2”; transcript_id |
| | | | | | “SS_NG2.2”; exon “4”; |
| chr8 | transcript | 78171057 | 78182416 | + | gene_id “SS_NG2”; transcript_id |
| | | | | | “SS_NG2.3”; RPKM “3.6477”; cov |
| | | | | | “57.9561”; |
| chr8 | exon | 78171057 | 78176499 | + | gene_id “SS_NG2”; transcript_id |
| | | | | | “SS_NG2.3”; exon “1”; |
| chr8 | exon | 78177038 | 78182416 | + | gene_id “SS_NG2”; transcript_id |
| | | | | | “SS_NG2.3”; exon “2”; |
| chr8 | transcript | 78171057 | 78182416 | + | gene_id “SS_NG2”; transcript_id |
| | | | | | “SS_NG2.4”; RPKM “1.5006”; cov |
| | | | | | “23.8413”; |
| chr8 | exon | 78171057 | 78172951 | + | gene_id “SS_NG2”; transcript_id |
| | | | | | “SS_NG2.4”; exon “1”; |
| chr8 | exon | 78175411 | 78175472 | + | gene_id “SS_NG2”; transcript_id |
| | | | | | “SS_NG2.4”; exon “2”; |
| chr8 | exon | 78176363 | 78176499 | + | gene_id “SS_NG2”; transcript_id |
| | | | | | “SS_NG2.4”; exon “3”; |
| chr8 | exon | 78177038 | 78182416 | + | gene_id “SS_NG2”; transcript_id |
| | | | | | “SS_NG2.4”; exon “4”; |
| chr8 | transcript | 78171057 | 78182416 | + | gene_id “SS_NG2”; transcript_id |
| | | | | | “SS_NG2.5”; RPKM “1.4691”; cov |
| | | | | | “23.3421”; |
| chr8 | exon | 78171057 | 78172951 | + | gene_id “SS_NG2”; transcript_id |
| | | | | | “SS_NG2.5”; exon “1”; |
| chr8 | exon | 78175411 | 78176499 | + | gene_id “SS_NG2”; transcript_id |
| | | | | | “SS_NG2.5”; exon “2”; |
| chr8 | exon | 78177038 | 78182416 | + | gene_id “SS_NG2”; transcript_id |
| | | | | | “SS_NG2.5”; exon “3”; |
| chr10 | transcript | 19012211 | 19206483 | − | gene_id “Ew_NG10”; transcript_id |
| | | | | | “Ew_NG10.5”; RPKM “0.7306”; cov |
| | | | | | “11.2000”; |
| chr10 | exon | 19012211 | 19018797 | − | gene_id “Ew_NG10”; transcript_id |
| | | | | | “Ew_NG10.5”; exon “1”; |
| chr10 | exon | 19130037 | 19130094 | − | gene_id “Ew_NG10”; transcript_id |
| | | | | | “Ew_NG10.5”; exon “2”; |
| chr10 | exon | 19149907 | 19149966 | − | gene_id “Ew_NG10”; transcript_id |
| | | | | | “Ew_NG10.5”; exon “3”; |
| chr10 | exon | 19206021 | 19206483 | − | gene_id “Ew_NG10”; transcript_id |
| | | | | | “Ew_NG10.5”; exon “4”; |
| chr10 | transcript | 19064680 | 19206483 | − | gene_id “Ew_NG10”; transcript_id |
| | | | | | “Ew_NG10.2”; RPKM “1.6734”; cov |
| | | | | | “25.6509”; |
| chr10 | exon | 19064680 | 19067502 | − | gene_id “Ew_NG10”; transcript_id |
| | | | | | “Ew_NG10.2”; exon “1”; |
| chr10 | exon | 19130037 | 19130094 | − | gene_id “Ew_NG10”; transcript_id |
| | | | | | “Ew_NG10.2”; exon “2”; |
| chr10 | exon | 19149907 | 19149966 | − | gene_id “Ew_NG10”; transcript_id |
| | | | | | “Ew_NG10.2”; exon “3”; |
| chr10 | exon | 19206021 | 19206483 | − | gene_id “Ew_NG10”; transcript_id |
| | | | | | “Ew_NG10.2”; exon “4”; |
| chr10 | transcript | 19064680 | 19206483 | − | gene_id “Ew_NG10”; transcript_id |
| | | | | | “Ew_NG10.3”; RPKM “0.7329”; cov |
| | | | | | “11.2348”; |
| chr10 | exon | 19064680 | 19067502 | − | gene_id “Ew_NG10”; transcript_id |
| | | | | | “Ew_NG10.3”; exon “1”; |
| chr10 | exon | 19130037 | 19130273 | − | gene_id “Ew_NG10”; transcript_id |
| | | | | | “Ew_NG10.3”; exon “2”; |
| chr10 | exon | 19149907 | 19149966 | − | gene_id “Ew_NG10”; transcript_id |
| | | | | | “Ew_NG10.3”; exon “3”; |
| chr10 | exon | 19206021 | 19206483 | − | gene_id “Ew_NG10”; transcript_id |
| | | | | | “Ew_NG10.3”; exon “4”; |
| chr10 | transcript | 19064680 | 19206483 | − | gene_id “Ew_NG10”; transcript_id |
| | | | | | “Ew_NG10.1”; RPKM “1.7240”; cov |
| | | | | | “26.4277”; |
| chr10 | exon | 19064680 | 19067502 | − | gene_id “Ew_NG10”; transcript_id |
| | | | | | “Ew_NG10.1”; exon “1”; |
| chr10 | exon | 19130037 | 19130094 | − | gene_id “Ew_NG10”; transcript_id |
| | | | | | “Ew_NG10.1”; exon “2”; |
| chr10 | exon | 19206021 | 19206483 | − | gene_id “Ew_NG10”; transcript_id |
| | | | | | “Ew_NG10.1”; exon “3”; |
| chr10 | transcript | 19142228 | 19206483 | − | gene_id “Ew_NG10”; transcript_id |
| | | | | | “Ew_NG10.4”; RPKM “1.0386”; cov |
| | | | | | “15.9205”; |
| chr10 | exon | 19142228 | 19149966 | − | gene_id “Ew_NG10”; transcript_id |
| | | | | | “Ew_NG10.4”; exon “1”; |
| chr10 | exon | 19206021 | 19206483 | − | gene_id “Ew_NG10”; transcript_id |
| | | | | | “Ew_NG10.4”; exon “2”; |
| chr10 | transcript | 26931917 | 26942059 | − | gene_id “Ew_NG11”; transcript_id |
| | | | | | “Ew_NG11.1”; RPKM “3.7572”; cov |
| | | | | | “57.5939”; |
| chr10 | exon | 26931917 | 26942059 | − | gene_id “Ew_NG11”; transcript_id |
| | | | | | “Ew_NG11.1”; exon “1”; |
| chr12 | transcript | 17234067 | 17238065 | − | gene_id “Ew_NG14”; transcript_id |
| | | | | | “Ew_NG14.1”; RPKM “1.4597”; cov |
| | | | | | “22.3758”; |
| chr12 | exon | 17234067 | 17238065 | − | gene_id “Ew_NG14”; transcript_id |
| | | | | | “Ew_NG14.1”; exon “1”; |
| chr12 | transcript | 17297942 | 17303506 | − | gene_id “Ew_NG14”; transcript_id |
| | | | | | “Ew_NG14.2”; RPKM “2.0704”; cov |
| | | | | | “31.7370”; |
| chr12 | exon | 17297942 | 17303506 | − | gene_id “Ew_NG14”; transcript_id |
| | | | | | “Ew_NG14.2”; exon “1”; |
| chr12 | transcript | 17297942 | 17315613 | − | gene_id “Ew_NG14”; transcript_id |
| | | | | | “Ew_NG14.3”; RPKM “0.7621”; cov |
| | | | | | “11.6819”; |
| chr12 | exon | 17297942 | 17299924 | − | gene_id “Ew_NG14”; transcript_id |
| | | | | | “Ew_NG14.3”; exon “1”; |
| chr12 | exon | 17309657 | 17315613 | − | gene_id “Ew_NG14”; transcript_id |
| | | | | | “Ew_NG14.3”; exon “2”; |
| chr12 | transcript | 17297942 | 17320826 | − | gene_id “Ew_NG14”; transcript_id |
| | | | | | “Ew_NG14.4”; RPKM “1.1479”; cov |
| | | | | | “17.5959”; |
| chr12 | exon | 17297942 | 17299924 | − | gene_id “Ew_NG14”; transcript_id |
| | | | | | “Ew_NG14.4”; exon “1”; |
| chr12 | exon | 17309657 | 17309808 | − | gene_id “Ew_NG14”; transcript_id |
| | | | | | “Ew_NG14.4”; exon “2”; |
| chr12 | exon | 17317578 | 17318077 | − | gene_id “Ew_NG14”; transcript_id |
| | | | | | “Ew_NG14.4”; exon “3”; |
| chr12 | exon | 17320594 | 17320826 | − | gene_id “Ew_NG14”; transcript_id |
| | | | | | “Ew_NG14.4”; exon “4”; |
| chr12 | transcript | 17297942 | 17320826 | − | gene_id “Ew_NG14”; transcript_id |
| | | | | | “Ew_NG14.5”; RPKM “1.4469”; cov |
| | | | | | “22.1798”; |
| chr12 | exon | 17297942 | 17299924 | − | gene_id “Ew_NG14”; transcript_id |
| | | | | | “Ew_NG14.5”; exon “1”; |
| chr12 | exon | 17309657 | 17309808 | − | gene_id “Ew_NG14”; transcript_id |
| | | | | | “Ew_NG14.5”; exon “2”; |
| chr12 | exon | 17317578 | 17318077 | − | gene_id “Ew_NG14”; transcript_id |
| | | | | | “Ew_NG14.5”; exon “3”; |
| chr12 | exon | 17319393 | 17319438 | − | gene_id “Ew_NG14”; transcript_id |
| | | | | | “Ew_NG14.5”; exon “4”; |
| chr12 | exon | 17320594 | 17320826 | − | gene_id “Ew_NG14”; transcript_id |
| | | | | | “Ew_NG14.5”; exon “5”; |
| chr12 | transcript | 100749011 | 100750710 | + | gene_id “Ew_NG15”; transcript_id |
| | | | | | “Ew_NG15.1”; RPKM “0.8672”; cov |
| | | | | | “13.2930”; |
| chr12 | exon | 100749011 | 100749133 | + | gene_id “Ew_NG15”; transcript_id |
| | | | | | “Ew_NG15.1”; exon “1”; |
| chr12 | exon | 100749361 | 100750710 | + | gene_id “Ew_NG15”; transcript_id |
| | | | | | “Ew_NG15.1”; exon “2”; |
| chr13 | transcript | 21852260 | 21871372 | − | gene_id “Ew_NG17”; transcript_id |
| | | | | | “Ew_NG17.1”; RPKM “1.3061”; cov |
| | | | | | “20.0207”; |
| chr13 | exon | 21852260 | 21861661 | − | gene_id “Ew_NG17”; transcript_id |
| | | | | | “Ew_NG17.1”; exon “1”; |
| chr13 | exon | 21861774 | 21861983 | − | gene_id “Ew_NG17”; transcript_id |
| | | | | | “Ew_NG17.1”; exon “2”; |
| chr13 | exon | 21866799 | 21866930 | − | gene_id “Ew_NG17”; transcript_id |
| | | | | | “Ew_NG17.1”; exon “3”; |
| chr13 | exon | 21867718 | 21867794 | − | gene_id “Ew_NG17”; transcript_id |
| | | | | | “Ew_NG17.1”; exon “4”; |
| chr13 | exon | 21871214 | 21871372 | − | gene_id “Ew_NG17”; transcript_id |
| | | | | | “Ew_NG17.1”; exon “5”; |
| chr13 | transcript | 21852260 | 21871372 | − | gene_id “Ew_NG17”; transcript_id |
| | | | | | “Ew_NG17.2”; RPKM “0.8464”; cov |
| | | | | | “12.9741”; |
| chr13 | exon | 21852260 | 21861661 | − | gene_id “Ew_NG17”; transcript_id |
| | | | | | “Ew_NG17.2”; exon “1”; |
| chr13 | exon | 21861774 | 21861965 | − | gene_id “Ew_NG17”; transcript_id |
| | | | | | “Ew_NG17.2”; exon “2”; |
| chr13 | exon | 21866799 | 21866930 | − | gene_id “Ew_NG17”; transcript_id |
| | | | | | “Ew_NG17.2”; exon “3”; |
| chr13 | exon | 21867718 | 21867794 | − | gene_id “Ew_NG17”; transcript_id |
| | | | | | “Ew_NG17.2”; exon “4”; |
| chr13 | exon | 21871214 | 21871372 | − | gene_id “Ew_NG17”; transcript_id |
| | | | | | “Ew_NG17.2”; exon “5”; |
| chr13 | transcript | 21852260 | 21871372 | − | gene_id “Ew_NG17”; transcript_id |
| | | | | | “Ew_NG17.3”; RPKM “0.8866”; cov |
| | | | | | “13.5901”; |
| chr13 | exon | 21852260 | 21861661 | − | gene_id “Ew_NG17”; transcript_id |
| | | | | | “Ew_NG17.3”; exon “1”; |
| chr13 | exon | 21861774 | 21861983 | − | gene_id “Ew_NG17”; transcript_id |
| | | | | | “Ew_NG17.3”; exon “2”; |
| chr13 | exon | 21866799 | 21871372 | − | gene_id “Ew_NG17”; transcript_id |
| | | | | | “Ew_NG17.3”; exon “3”; |
| chr13 | transcript | 21852260 | 21871372 | − | gene_id “Ew_NG17”; transcript_id |
| | | | | | “Ew_NG17.4”; RPKM “1.4717”; cov |
| | | | | | “22.5601”; |
| chr13 | exon | 21852260 | 21861661 | − | gene_id “Ew_NG17”; transcript_id |
| | | | | | “Ew_NG17.4”; exon “1”; |
| chr13 | exon | 21861774 | 21861965 | − | gene_id “Ew_NG17”; transcript_id |
| | | | | | “Ew_NG17.4”; exon “2”; |
| chr13 | exon | 21866799 | 21871372 | − | gene_id “Ew_NG17”; transcript_id |
| | | | | | “Ew_NG17.4”; exon “3”; |
| chr13 | transcript | 21852260 | 21871372 | − | gene_id “Ew_NG17”; transcript_id |
| | | | | | “Ew_NG17.5”; RPKM “1.3476”; cov |
| | | | | | “20.6569”; |
| chr13 | exon | 21852260 | 21861661 | − | gene_id “Ew_NG17”; transcript_id |
| | | | | | “Ew_NG17.5”; exon “1”; |
| chr13 | exon | 21861774 | 21861983 | − | gene_id “Ew_NG17”; transcript_id |
| | | | | | “Ew_NG17.5”; exon “2”; |
| chr13 | exon | 21866799 | 21866930 | − | gene_id “Ew_NG17”; transcript_id |
| | | | | | “Ew_NG17.5”; exon “3”; |
| chr13 | exon | 21867642 | 21867794 | − | gene_id “Ew_NG17”; transcript_id |
| | | | | | “Ew_NG17.5”; exon “4”; |
| chr13 | exon | 21871214 | 21871372 | − | gene_id “Ew_NG17”; transcript_id |
| | | | | | “Ew_NG17.5”; exon “5”; |
| chr13 | transcript | 21852260 | 21871372 | − | gene_id “Ew_NG17”; transcript_id |
| | | | | | “Ew_NG17.6”; RPKM “3.3424”; cov |
| | | | | | “51.2347”; |
| chr13 | exon | 21852260 | 21861661 | − | gene_id “Ew_NG17”; transcript_id |
| | | | | | “Ew_NG17.6”; exon “1”; |
| chr13 | exon | 21861774 | 21861965 | − | gene_id “Ew_NG17”; transcript_id |
| | | | | | “Ew_NG17.6”; exon “2”; |
| chr13 | exon | 21866799 | 21866930 | − | gene_id “Ew_NG17”; transcript_id |
| | | | | | “Ew_NG17.6”; exon “3”; |
| chr13 | exon | 21867642 | 21871372 | − | gene_id “Ew_NG17”; transcript_id |
| | | | | | “Ew_NG17.6”; exon “4”; |
| chr13 | transcript | 21852260 | 21871372 | − | gene_id “Ew_NG17”; transcript_id |
| | | | | | “Ew_NG17.7”; RPKM “1.1223”; cov |
| | | | | | “17.2034”; |
| chr13 | exon | 21852260 | 21861661 | − | gene_id “Ew_NG17”; transcript_id |
| | | | | | “Ew_NG17.7”; exon “1”; |
| chr13 | exon | 21861774 | 21861965 | − | gene_id “Ew_NG17”; transcript_id |
| | | | | | “Ew_NG17.7”; exon “2”; |
| chr13 | exon | 21866799 | 21866930 | − | gene_id “Ew_NG17”; transcript_id |
| | | | | | “Ew_NG17.7”; exon “3”; |
| chr13 | exon | 21867642 | 21867794 | − | gene_id “Ew_NG17”; transcript_id |
| | | | | | “Ew_NG17.7”; exon “4”; |
| chr13 | exon | 21871214 | 21871372 | − | gene_id “Ew_NG17”; transcript_id |
| | | | | | “Ew_NG17.7”; exon “5”; |
| chr13 | transcript | 31611186 | 31616347 | − | gene_id “Ew_NG18”; transcript_id |
| | | | | | “Ew_NG18.1”; RPKM “1.2160”; cov |
| | | | | | “18.6401”; |
| chr13 | exon | 31611186 | 31611750 | − | gene_id “Ew_NG18”; transcript_id |
| | | | | | “Ew_NG18.1”; exon “1”; |
| chr13 | exon | 31612458 | 31612628 | − | gene_id “Ew_NG18”; transcript_id |
| | | | | | “Ew_NG18.1”; exon “2”; |
| chr13 | exon | 31616031 | 31616347 | − | gene_id “Ew_NG18”; transcript_id |
| | | | | | “Ew_NG18.1”; exon “3”; |
| chr13 | transcript | 31611186 | 31616347 | − | gene_id “Ew_NG18”; transcript_id |
| | | | | | “Ew_NG18.2”; RPKM “1.7333”; cov |
| | | | | | “26.5694”; |
| chr13 | exon | 31611186 | 31612130 | − | gene_id “Ew_NG18”; transcript_id |
| | | | | | “Ew_NG18.2”; exon “1”; |
| chr13 | exon | 31612458 | 31612628 | − | gene_id “Ew_NG18”; transcript_id |
| | | | | | “Ew_NG18.2”; exon “2”; |
| chr13 | exon | 31616031 | 31616347 | − | gene_id “Ew_NG18”; transcript_id |
| | | | | | “Ew_NG18.2”; exon “3”; |
| chr13 | transcript | 31611186 | 31616347 | − | gene_id “Ew_NG18”; transcript_id |
| | | | | | “Ew_NG18.3”; RPKM “2.2950”; cov |
| | | | | | “35.1794”; |
| chr13 | exon | 31611186 | 31612628 | − | gene_id “Ew_NG18”; transcript_id |
| | | | | | “Ew_NG18.3”; exon “1”; |
| chr13 | exon | 31616031 | 31616347 | − | gene_id “Ew_NG18”; transcript_id |
| | | | | | “Ew_NG18.3”; exon “2”; |
| chr13 | transcript | 39626480 | 39629861 | + | gene_id “Ew_NG19”; transcript_id |
| | | | | | “Ew_NG19.1”; RPKM “2.2687”; cov |
| | | | | | “34.7764”; |
| chr13 | exon | 39626480 | 39629861 | + | gene_id “Ew_NG19”; transcript_id |
| | | | | | “Ew_NG19.1”; exon “1”; |
| chr13 | transcript | 39636412 | 39677230 | + | gene_id “Ew_NG19”; transcript_id |
| | | | | | “Ew_NG19.2”; RPKM “3.3646”; cov |
| | | | | | “51.5758”; |
| chr13 | exon | 39636412 | 39656665 | + | gene_id “Ew_NG19”; transcript_id |
| | | | | | “Ew_NG19.2”; exon “1”; |
| chr13 | exon | 39659264 | 39659391 | + | gene_id “Ew_NG19”; transcript_id |
| | | | | | “Ew_NG19.2”; exon “2”; |
| chr13 | exon | 39662919 | 39677230 | + | gene_id “Ew_NG19”; transcript_id |
| | | | | | “Ew_NG19.2”; exon “3”; |
| chr13 | transcript | 39636412 | 39677230 | + | gene_id “Ew_NG19”; transcript_id |
| | | | | | “Ew_NG19.3”; RPKM “1.0481”; cov |
| | | | | | “16.0663”; |
| chr13 | exon | 39636412 | 39655500 | + | gene_id “Ew_NG19”; transcript_id |
| | | | | | “Ew_NG19.3”; exon “1”; |
| chr13 | exon | 39656578 | 39656665 | + | gene_id “Ew_NG19”; transcript_id |
| | | | | | “Ew_NG19.3”; exon “2”; |
| chr13 | exon | 39659264 | 39659391 | + | gene_id “Ew_NG19”; transcript_id |
| | | | | | “Ew_NG19.3”; exon “3”; |
| chr13 | exon | 39662919 | 39677230 | + | gene_id “Ew_NG19”; transcript_id |
| | | | | | “Ew_NG19.3”; exon “4”; |
| chr19 | transcript | 40653693 | 40656644 | + | gene_id “Ew_NG21”; transcript_id |
| | | | | | “Ew_NG21.1”; RPKM “2.1567”; cov |
| | | | | | “33.0593”; |
| chr19 | exon | 40653693 | 40656644 | + | gene_id “Ew_NG21”; transcript_id |
| | | | | | “Ew_NG21.1”; exon “1”; |
| chr19 | transcript | 40615687 | 40649633 | − | gene_id “Ew_NG22”; transcript_id |
| | | | | | “Ew_NG22.1”; RPKM “1.5547”; cov |
| | | | | | “23.8321”; |
| chr19 | exon | 40615687 | 40617835 | − | gene_id “Ew_NG22”; transcript_id |
| | | | | | “Ew_NG22.1”; exon “1”; |
| chr19 | exon | 40649500 | 40649633 | − | gene_id “Ew_NG22”; transcript_id |
| | | | | | “Ew_NG22.1”; exon “2”; |
| chr19 | transcript | 40615687 | 40649633 | − | gene_id “Ew_NG22”; transcript_id |
| | | | | | “Ew_NG22.2”; RPKM “0.7890”; cov |
| | | | | | “12.0942”; |
| chr19 | exon | 40615687 | 40617835 | − | gene_id “Ew_NG22”; transcript_id |
| | | | | | “Ew_NG22.2”; exon “1”; |
| chr19 | exon | 40639615 | 40639707 | − | gene_id “Ew_NG22”; transcript_id |
| | | | | | “Ew_NG22.2”; exon “2”; |
| chr19 | exon | 40649500 | 40649633 | − | gene_id “Ew_NG22”; transcript_id |
| | | | | | “Ew_NG22.2”; exon “3”; |
| chr19 | transcript | 40615687 | 40649633 | − | gene_id “Ew_NG22”; transcript_id |
| | | | | | “Ew_NG22.4”; RPKM “1.7938”; cov |
| | | | | | “27.4973”; |
| chr19 | exon | 40615687 | 40617835 | − | gene_id “Ew_NG22”; transcript_id |
| | | | | | “Ew_NG22.4”; exon “1”; |
| chr19 | exon | 40619688 | 40620669 | − | gene_id “Ew_NG22”; transcript_id |
| | | | | | “Ew_NG22.4”; exon “2”; |
| chr19 | exon | 40649500 | 40649633 | − | gene_id “Ew_NG22”; transcript_id |
| | | | | | “Ew_NG22.4”; exon “3”; |
| chr19 | transcript | 40615687 | 40649633 | − | gene_id “Ew_NG22”; transcript_id |
| | | | | | “Ew_NG22.3”; RPKM “1.4628”; cov |
| | | | | | “22.4224”; |
| chr19 | exon | 40615687 | 40620669 | − | gene_id “Ew_NG22”; transcript_id |
| | | | | | “Ew_NG22.3”; exon “1”; |
| chr19 | exon | 40649500 | 40649633 | − | gene_id “Ew_NG22”; transcript_id |
| | | | | | “Ew_NG22.3”; exon “2”; |
| chr19 | transcript | 49754681 | 49756653 | + | gene_id “Ew_NG23”; transcript_id |
| | | | | | “Ew_NG23.1”; RPKM “1.3830”; cov |
| | | | | | “21.1997”; |
| chr19 | exon | 49754681 | 49756653 | + | gene_id “Ew_NG23”; transcript_id |
| | | | | | “Ew_NG23.1”; exon “1”; |
| chr19 | transcript | 49757333 | 49765359 | + | gene_id “Ew_NG23”; transcript_id |
| | | | | | “Ew_NG23.2”; RPKM “1.5690”; cov |
| | | | | | “24.0516”; |
| chr19 | exon | 49757333 | 49765359 | + | gene_id “Ew_NG23”; transcript_id |
| | | | | | “Ew_NG23.2”; exon “1”; |
| chr2 | transcript | 4633146 | 4637198 | + | gene_id “Ew_NG2”; transcript_id |
| | | | | | “Ew_NG2.2”; RPKM “0.7645”; cov |
| | | | | | “11.7183”; |
| chr2 | exon | 4633146 | 4633417 | + | gene_id “Ew_NG2”; transcript_id |
| | | | | | “Ew_NG2.2”; exon “1”; |
| chr2 | exon | 4634455 | 4634523 | + | gene_id “Ew_NG2”; transcript_id |
| | | | | | “Ew_NG2.2”; exon “2”; |
| chr2 | exon | 4636162 | 4637198 | + | gene_id “Ew_NG2”; transcript_id |
| | | | | | “Ew_NG2.2”; exon “3”; |
| chr2 | transcript | 4634024 | 4708904 | + | gene_id “Ew_NG2”; transcript_id |
| | | | | | “Ew_NG2.3”; RPKM “3.2015”; cov |
| | | | | | “49.0761”; |
| chr2 | exon | 4634024 | 4634523 | + | gene_id “Ew_NG2”; transcript_id |
| | | | | | “Ew_NG2.3”; exon “1”; |
| chr2 | exon | 4674955 | 4675043 | + | gene_id “Ew_NG2”; transcript_id |
| | | | | | “Ew_NG2.3”; exon “2”; |
| chr2 | exon | 4698519 | 4708904 | + | gene_id “Ew_NG2”; transcript_id |
| | | | | | “Ew_NG2.3”; exon “3”; |
| chr2 | transcript | 4795659 | 4801746 | + | gene_id “Ew_NG2”; transcript_id |
| | | | | | “Ew_NG2.1”; RPKM “1.6250”; cov |
| | | | | | “24.9093”; |
| chr2 | exon | 4795659 | 4801746 | + | gene_id “Ew_NG2”; transcript_id |
| | | | | | “Ew_NG2.1”; exon “1”; |
| chr2 | transcript | 133033581 | 133035142 | − | gene_id “Ew_NG3”; transcript_id |
| | | | | | “Ew_NG3.1”; RPKM “0.7274”; cov |
| | | | | | “11.1495”; |
| chr2 | exon | 133033581 | 133034074 | − | gene_id “Ew_NG3”; transcript_id |
| | | | | | “Ew_NG3.1”; exon “1”; |
| chr2 | exon | 133034603 | 133034739 | − | gene_id “Ew_NG3”; transcript_id |
| | | | | | “Ew_NG3.1”; exon “2”; |
| chr2 | exon | 133035011 | 133035142 | − | gene_id “Ew_NG3”; transcript_id |
| | | | | | “Ew_NG3.1”; exon “3”; |
| chr20 | transcript | 21537669 | 21543139 | + | gene_id “Ew_NG24”; transcript_id |
| | | | | | “Ew_NG24.1”; RPKM “2.8304”; cov |
| | | | | | “43.3865”; |
| chr20 | exon | 21537669 | 21538578 | + | gene_id “Ew_NG24”; transcript_id |
| | | | | | “Ew_NG24.1”; exon “1”; |
| chr20 | exon | 21540530 | 21543139 | + | gene_id “Ew_NG24”; transcript_id |
| | | | | | “Ew_NG24.1”; exon “2”; |
| chr20 | transcript | 21537669 | 21598613 | + | gene_id “Ew_NG24”; transcript_id |
| | | | | | “Ew_NG24.3”; RPKM “1.8896”; cov |
| | | | | | “28.9655”; |
| chr20 | exon | 21537669 | 21538578 | + | gene_id “Ew_NG24”; transcript_id |
| | | | | | “Ew_NG24.3”; exon “1”; |
| chr20 | exon | 21593186 | 21593321 | + | gene_id “Ew_NG24”; transcript_id |
| | | | | | “Ew_NG24.3”; exon “2”; |
| chr20 | exon | 21596021 | 21596165 | + | gene_id “Ew_NG24”; transcript_id |
| | | | | | “Ew_NG24.3”; exon “3”; |
| chr20 | exon | 21596251 | 21598613 | + | gene_id “Ew_NG24”; transcript_id |
| | | | | | “Ew_NG24.3”; exon “4”; |
| chr20 | transcript | 21593088 | 21598613 | + | gene_id “Ew_NG24”; transcript_id |
| | | | | | “Ew_NG24.2”; RPKM “1.1532”; cov |
| | | | | | “17.6775”; |
| chr20 | exon | 21593088 | 21593321 | + | gene_id “Ew_NG24”; transcript_id |
| | | | | | “Ew_NG24.2”; exon “1”; |
| chr20 | exon | 21596021 | 21596165 | + | gene_id “Ew_NG24”; transcript_id |
| | | | | | “Ew_NG24.2”; exon “2”; |
| chr20 | exon | 21596251 | 21598613 | + | gene_id “Ew_NG24”; transcript_id |
| | | | | | “Ew_NG24.2”; exon “3”; |
| chr20 | transcript | 21604484 | 21612837 | + | gene_id “Ew_NG25”; transcript_id |
| | | | | | “Ew_NG25.1”; RPKM “2.7790”; cov |
| | | | | | “42.5995”; |
| chr20 | exon | 21604484 | 21612837 | + | gene_id “Ew_NG25”; transcript_id |
| | | | | | “Ew_NG25.1”; exon “1”; |
| chr4 | transcript | 8078741 | 8087977 | + | gene_id “Ew_NG5”; transcript_id |
| | | | | | “Ew_NG5.1”; RPKM “12.6756”; cov |
| | | | | | “194.3033”; |
| chr4 | exon | 8078741 | 8087977 | + | gene_id “Ew_NG5”; transcript_id |
| | | | | | “Ew_NG5.1”; exon “1”; |
| chr5 | transcript | 157372872 | 157410161 | + | gene_id “Ew_NG6”; transcript_id |
| | | | | | “Ew_NG6.1”; RPKM “1.0807”; cov |
| | | | | | “16.5652”; |
| chr5 | exon | 157372872 | 157373508 | + | gene_id “Ew_NG6”; transcript_id |
| | | | | | “Ew_NG6.1”; exon “1”; |
| chr5 | exon | 157409256 | 157410161 | + | gene_id “Ew_NG6”; transcript_id |
| | | | | | “Ew_NG6.1”; exon “2”; |
| chr5 | transcript | 157372872 | 157410161 | + | gene_id “Ew_NG6”; transcript_id |
| | | | | | “Ew_NG6.2”; RPKM “0.7152”; cov |
| | | | | | “10.9632”; |
| chr5 | exon | 157372872 | 157372974 | + | gene_id “Ew_NG6”; transcript_id |
| | | | | | “Ew_NG6.2”; exon “1”; |
| chr5 | exon | 157403125 | 157403337 | + | gene_id “Ew_NG6”; transcript_id |
| | | | | | “Ew_NG6.2”; exon “2”; |
| chr5 | exon | 157409256 | 157410161 | + | gene_id “Ew_NG6”; transcript_id |
| | | | | | “Ew_NG6.2”; exon “3”; |
| chr5 | transcript | 157400974 | 157410161 | + | gene_id “Ew_NG6”; transcript_id |
| | | | | | “Ew_NG6.3”; RPKM “0.9828”; cov |
| | | | | | “15.0657”; |
| chr5 | exon | 157400974 | 157403337 | + | gene_id “Ew_NG6”; transcript_id |
| | | | | | “Ew_NG6.3”; exon “1”; |
| chr5 | exon | 157409256 | 157410161 | + | gene_id “Ew_NG6”; transcript_id |
| | | | | | “Ew_NG6.3”; exon “2”; |
| chr8 | transcript | 6183756 | 6189727 | + | gene_id “Ew_NG7”; transcript_id |
| | | | | | “Ew_NG7.1”; RPKM “1.1857”; cov |
| | | | | | “18.1754”; |
| chr8 | exon | 6183756 | 6183900 | + | gene_id “Ew_NG7”; transcript_id |
| | | | | | “Ew_NG7.1”; exon “1”; |
| chr8 | exon | 6189197 | 6189727 | + | gene_id “Ew_NG7”; transcript_id |
| | | | | | “Ew_NG7.1”; exon “2”; |
| chr8 | transcript | 27005650 | 27047229 | − | gene_id “Ew_NG8”; transcript_id |
| | | | | | “Ew_NG8.1”; RPKM “112.8233”; cov |
| | | | | | “1729.4563”; |
| chr8 | exon | 27005650 | 27009409 | − | gene_id “Ew_NG8”; transcript_id |
| | | | | | “Ew_NG8.1”; exon “1”; |
| chr8 | exon | 27046675 | 27047229 | − | gene_id “Ew_NG8”; transcript_id |
| | | | | | “Ew_NG8.1”; exon “2”; |
| chr8 | transcript | 27005650 | 27047229 | − | gene_id “Ew_NG8”; transcript_id |
| | | | | | “Ew_NG8.2”; RPKM “1.0177”; cov |
| | | | | | “15.6000”; |
| chr8 | exon | 27005650 | 27009409 | − | gene_id “Ew_NG8”; transcript_id |
| | | | | | “Ew_NG8.2”; exon “1”; |
| chr8 | exon | 27027995 | 27028040 | − | gene_id “Ew_NG8”; transcript_id |
| | | | | | “Ew_NG8.2”; exon “2”; |
| chr8 | exon | 27046675 | 27047229 | − | gene_id “Ew_NG8”; transcript_id |
| | | | | | “Ew_NG8.2”; exon “3”; |
| chr8 | transcript | 27005650 | 27047229 | − | gene_id “Ew_NG8”; transcript_id |
| | | | | | “Ew_NG8.7”; RPKM “0.9321”; cov |
| | | | | | “14.2882”; |
| chr8 | exon | 27005650 | 27016399 | − | gene_id “Ew_NG8”; transcript_id |
| | | | | | “Ew_NG8.7”; exon “1”; |
| chr8 | exon | 27021071 | 27021129 | − | gene_id “Ew_NG8”; transcript_id |
| | | | | | “Ew_NG8.7”; exon “2”; |
| chr8 | exon | 27046675 | 27047229 | − | gene_id “Ew_NG8”; transcript_id |
| | | | | | “Ew_NG8.7”; exon “3”; |
| chr8 | transcript | 27005650 | 27047229 | − | gene_id “Ew_NG8”; transcript_id |
| | | | | | “Ew_NG8.6”; RPKM “0.8994”; cov |
| | | | | | “13.7873”; |
| chr8 | exon | 27005650 | 27009409 | − | gene_id “Ew_NG8”; transcript_id |
| | | | | | “Ew_NG8.6”; exon “1”; |
| chr8 | exon | 27013135 | 27013241 | − | gene_id “Ew_NG8”; transcript_id |
| | | | | | “Ew_NG8.6”; exon “2”; |
| chr8 | exon | 27046675 | 27047229 | − | gene_id “Ew_NG8”; transcript_id |
| | | | | | “Ew_NG8.6”; exon “3”; |
| chr8 | transcript | 27005650 | 27047229 | − | gene_id “Ew_NG8”; transcript_id |
| | | | | | “Ew_NG8.5”; RPKM “20.5120”; cov |
| | | | | | “314.4266”; |
| chr8 | exon | 27005650 | 27009409 | − | gene_id “Ew_NG8”; transcript_id |
| | | | | | “Ew_NG8.5”; exon “1”; |
| chr8 | exon | 27021071 | 27021129 | − | gene_id “Ew_NG8”; transcript_id |
| | | | | | “Ew_NG8.5”; exon “2”; |
| chr8 | exon | 27046675 | 27047229 | − | gene_id “Ew_NG8”; transcript_id |
| | | | | | “Ew_NG8.5”; exon “3”; |
| chr8 | transcript | 27026051 | 27047229 | − | gene_id “Ew_NG8”; transcript_id |
| | | | | | “Ew_NG8.4”; RPKM “6.8060”; cov |
| | | | | | “104.3279”; |
| chr8 | exon | 27026051 | 27042494 | − | gene_id “Ew_NG8”; transcript_id |
| | | | | | “Ew_NG8.4”; exon “1”; |
| chr8 | exon | 27046675 | 27047229 | − | gene_id “Ew_NG8”; transcript_id |
| | | | | | “Ew_NG8.4”; exon “2”; |
| chr8 | transcript | 27033709 | 27047229 | − | gene_id “Ew_NG8”; transcript_id |
| | | | | | “Ew_NG8.3”; RPKM “6.4353”; cov |
| | | | | | “98.6458”; |
| chr8 | exon | 27033709 | 27042018 | − | gene_id “Ew_NG8”; transcript_id |
| | | | | | “Ew_NG8.3”; exon “1”; |
| chr8 | exon | 27046675 | 27047229 | − | gene_id “Ew_NG8”; transcript_id |
| | | | | | “Ew_NG8.3”; exon “2”; |
| chr9 | transcript | 16084058 | 16095297 | + | gene_id “Ew_NG9”; transcript_id |
| | | | | | “Ew_NG9.1”; RPKM “1.5231”; cov |
| | | | | | “23.3469”; |
| chr9 | exon | 16084058 | 16095297 | + | gene_id “Ew_NG9”; transcript_id |
| | | | | | “Ew_NG9.1”; exon “1”; |
| chr1 | transcript | 73171083 | 73221254 | + | gene_id “Ew_NG1”; transcript_id |
| | | | | | “Ew_NG1.1”; RPKM “1.7032”; cov |
| | | | | | “30.4365”; |
| chr1 | exon | 73171083 | 73171273 | + | gene_id “Ew_NG1”; transcript_id |
| | | | | | “Ew_NG1.1”; exon “1”; |
| chr1 | exon | 73174742 | 73174919 | + | gene_id “Ew_NG1”; transcript_id |
| | | | | | “Ew_NG1.1”; exon “2”; |
| chr1 | exon | 73219351 | 73221254 | + | gene_id “Ew_NG1”; transcript_id |
| | | | | | “Ew_NG1.1”; exon “3”; |
| chr13 | transcript | 31571787 | 31590888 | − | gene_id “Ew_NG12”; transcript_id |
| | | | | | “Ew_NG12.1”; RPKM “1.8525”; cov |
| | | | | | “33.1034”; |
| chr13 | exon | 31571787 | 31573006 | − | gene_id “Ew_NG12”; transcript_id |
| | | | | | “Ew_NG12.1”; exon “1”; |
| chr13 | exon | 31575483 | 31575583 | − | gene_id “Ew_NG12”; transcript_id |
| | | | | | “Ew_NG12.1”; exon “2”; |
| chr13 | exon | 31583450 | 31583627 | − | gene_id “Ew_NG12”; transcript_id |
| | | | | | “Ew_NG12.1”; exon “3”; |
| chr13 | exon | 31590612 | 31590888 | − | gene_id “Ew_NG12”; transcript_id |
| | | | | | “Ew_NG12.1”; exon “4”; |
| chr13 | transcript | 31577913 | 31590888 | − | gene_id “Ew_NG12”; transcript_id |
| | | | | | “Ew_NG12.2”; RPKM “0.8159”; cov |
| | | | | | “14.5800”; |
| chr13 | exon | 31577913 | 31579070 | − | gene_id “Ew_NG12”; transcript_id |
| | | | | | “Ew_NG12.2”; exon “1”; |
| chr13 | exon | 31583450 | 31583627 | − | gene_id “Ew_NG12”; transcript_id |
| | | | | | “Ew_NG12.2”; exon “2”; |
| chr13 | exon | 31590612 | 31590888 | − | gene_id “Ew_NG12”; transcript_id |
| | | | | | “Ew_NG12.2”; exon “3”; |
| chr14 | transcript | 62935997 | 63066538 | − | gene_id “Ew_NG13”; transcript_id |
| | | | | | “Ew_NG13.1”; RPKM “0.6622”; cov |
| | | | | | “11.8340”; |
| chr14 | exon | 62935997 | 62938240 | − | gene_id “Ew_NG13”; transcript_id |
| | | | | | “Ew_NG13.1”; exon “1”; |
| chr14 | exon | 62952321 | 62952545 | − | gene_id “Ew_NG13”; transcript_id |
| | | | | | “Ew_NG13.1”; exon “2”; |
| chr14 | exon | 62954188 | 62954496 | − | gene_id “Ew_NG13”; transcript_id |
| | | | | | “Ew_NG13.1”; exon “3”; |
| chr14 | exon | 62954981 | 62955105 | − | gene_id “Ew_NG13”; transcript_id |
| | | | | | “Ew_NG13.1”; exon “4”; |
| chr14 | exon | 62959391 | 62959490 | − | gene_id “Ew_NG13”; transcript_id |
| | | | | | “Ew_NG13.1”; exon “5”; |
| chr14 | exon | 63066366 | 63066538 | − | gene_id “Ew_NG13”; transcript_id |
| | | | | | “Ew_NG13.1”; exon “6”; |
| chr16 | transcript | 8686922 | 8687845 | + | gene_id “Ew_NG16”; transcript_id |
| | | | | | “Ew_NG16.1”; RPKM “4.7102”; cov |
| | | | | | “84.1710”; |
| chr16 | exon | 8686922 | 8687845 | + | gene_id “Ew_NG16”; transcript_id |
| | | | | | “Ew_NG16.1”; exon “1”; |
| chr4 | transcript | 118075235 | 118081651 | + | gene_id “Ew_NG4”; transcript_id |
| | | | | | “Ew_NG4.1”; RPKM “1.7974”; cov |
| | | | | | “32.1197”; |
| chr4 | exon | 118075235 | 118075393 | + | gene_id “Ew_NG4”; transcript_id |
| | | | | | “Ew_NG4.1”; exon “1”; |
| chr4 | exon | 118080857 | 118081651 | + | gene_id “Ew_NG4”; transcript_id |
| | | | | | “Ew_NG4.1”; exon “2”; |
| chrX | transcript | 52799508 | 52810286 | − | gene_id “Ew_NG20”; transcript_id |
| | | | | | “Ew_NG20.1”; RPKM “0.6979”; cov |
| | | | | | “12.4714”; |
| chrX | exon | 52799508 | 52799624 | − | gene_id “Ew_NG20”; transcript_id |
| | | | | | “Ew_NG20.1”; exon “1”; |
| chrX | exon | 52809582 | 52809671 | − | gene_id “Ew_NG20”; transcript_id |
| | | | | | “Ew_NG20.1”; exon “2”; |
| chrX | exon | 52809783 | 52810286 | − | gene_id “Ew_NG20”; transcript_id |
| | | | | | “Ew_NG20.1”; exon “3”; |
| chrX | transcript | 52808948 | 52810286 | − | gene_id “Ew_NG20”; transcript_id |
| | | | | | “Ew_NG20.2”; RPKM “8.6550”; cov |
| | | | | | “154.6633”; |
| chrX | exon | 52808948 | 52809671 | − | gene_id “Ew_NG20”; transcript_id |
| | | | | | “Ew_NG20.2”; exon “1”; |
| chrX | exon | 52809783 | 52810286 | − | gene_id “Ew_NG20”; transcript_id |
| | | | | | “Ew_NG20.2”; exon “2”; |
| chr10 | transcript | 1778736 | 1780373 | + | gene_id “AFH_NG9”; transcript_id |
| | | | | | “AFH_NG9.1”; RPKM “4.2559”; cov |
| | | | | | “47.3341”; |
| chr10 | exon | 1778736 | 1780373 | + | gene_id “AFH_NG9”; transcript_id |
| | | | | | “AFH_NG9.1”; exon “1”; |
| chr10 | transcript | 1595092 | 1600429 | − | gene_id “AFH_NG10”; transcript_id |
| | | | | | “AFH_NG10.1”; RPKM “5.0731”; cov |
| | | | | | “56.4228”; |
| chr10 | exon | 1595092 | 1600429 | − | gene_id “AFH_NG10”; transcript_id |
| | | | | | “AFH_NG10.1”; exon “1”; |
| chr11 | transcript | 134450851 | 134454089 | − | gene_id “AFH_NG11”; transcript_id |
| | | | | | “AFH_NG11.1”; RPKM “2.3309”; cov |
| | | | | | “25.9249”; |
| chr11 | exon | 134450851 | 134451453 | − | gene_id “AFH_NG11”; transcript_id |
| | | | | | “AFH_NG11.1”; exon “1”; |
| chr11 | exon | 134453612 | 134454089 | − | gene_id “AFH_NG11”; transcript_id |
| | | | | | “AFH_NG11.1”; exon “2”; |
| chr12 | transcript | 5531617 | 5543161 | − | gene_id “AFH_NG12”; transcript_id |
| | | | | | “AFH_NG12.1”; RPKM “10.4014”; cov |
| | | | | | “115.6853”; |
| chr12 | exon | 5531617 | 5538474 | − | gene_id “AFH_NG12”; transcript_id |
| | | | | | “AFH_NG12.1”; exon “1”; |
| chr12 | exon | 5539507 | 5540451 | − | gene_id “AFH_NG12”; transcript_id |
| | | | | | “AFH_NG12.1”; exon “2”; |
| chr12 | exon | 5540611 | 5541467 | − | gene_id “AFH_NG12”; transcript_id |
| | | | | | “AFH_NG12.1”; exon “3”; |
| chr12 | exon | 5542222 | 5543161 | − | gene_id “AFH_NG12”; transcript_id |
| | | | | | “AFH_NG12.1”; exon “4”; |
| chr12 | transcript | 5531617 | 5543161 | − | gene_id “AFH_NG12”; transcript_id |
| | | | | | “AFH_NG12.2”; RPKM “11.1707”; cov |
| | | | | | “124.2416”; |
| chr12 | exon | 5531617 | 5538474 | − | gene_id “AFH_NG12”; transcript_id |
| | | | | | “AFH_NG12.2”; exon “1”; |
| chr12 | exon | 5539507 | 5540451 | − | gene_id “AFH_NG12”; transcript_id |
| | | | | | “AFH_NG12.2”; exon “2”; |
| chr12 | exon | 5540611 | 5543161 | − | gene_id “AFH_NG12”; transcript_id |
| | | | | | “AFH_NG12.2”; exon “3”; |
| chr12 | transcript | 5637918 | 5641928 | + | gene_id “AFH_NG13”; transcript_id |
| | | | | | “AFH_NG13.1”; RPKM “5.5218”; cov |
| | | | | | “61.4136”; |
| chr1 2 | exon | 5637918 | 5641928 | + | gene_id “AFH_NG13”; transcript_id |
| | | | | | “AFH_NG13.1”; exon “1”; |
| chr12 | transcript | 129537390 | 129539654 | − | gene_id “AFH_NG14”; transcript_id |
| | | | | | “AFH_NG14.1”; RPKM “2.1949”; cov |
| | | | | | “24.4115”; |
| chr12 | exon | 129537390 | 129539654 | − | gene_id “AFH_NG14”; transcript_id |
| | | | | | “AFH_NG14.1”; exon “1”; |
| chr1 3 | transcript | 29295709 | 29305491 | + | gene_id “AFH_NG15”; transcript_id |
| | | | | | “AFH_NG15.1”; RPKM “2.6231”; cov |
| | | | | | “29.1742”; |
| chr13 | exon | 29295709 | 29305491 | + | gene_id “AFH_NG15”; transcript_id |
| | | | | | “AFH_NG15.1”; exon “1”; |
| chr16 | transcript | 86663670 | 86666438 | + | gene_id “AFH_NG16”; transcript_id |
| | | | | | “AFH_NG16.1”; RPKM “5.3721”; cov |
| | | | | | “59.7488”; |
| chr16 | exon | 86663670 | 86666438 | + | gene_id “AFH_NG16”; transcript_id |
| | | | | | “AFH_NG16.1”; exon “1”; |
| chr17 | transcript | 6245849 | 6268793 | − | gene_id “AFH_NG17”; transcript_id |
| | | | | | “AFH_NG17.2”; RPKM “1.0621”; cov |
| | | | | | “11.8122”; |
| chr17 | exon | 6245849 | 6246191 | − | gene_id “AFH_NG17”; transcript_id |
| | | | | | “AFH_NG17.2”; exon “1”; |
| chr17 | exon | 6258068 | 6258152 | − | gene_id “AFH_NG17”; transcript_id |
| | | | | | “AFH_NG17.2”; exon “2”; |
| chr17 | exon | 6268472 | 6268793 | − | gene_id “AFH_NG17”; transcript_id |
| | | | | | “AFH_NG17.2”; exon “3”; |
| chr17 | transcript | 6255407 | 6268793 | − | gene_id “AFH_NG17”; transcript_id |
| | | | | | “AFH_NG17.1”; RPKM “1.4945”; cov |
| | | | | | “16.6225”; |
| chr17 | exon | 6255407 | 6258152 | − | gene_id “AFH_NG17”; transcript_id |
| | | | | | “AFH_NG17.1”; exon “1”; |
| chr17 | exon | 6268472 | 6268793 | − | gene_id “AFH_NG17”; transcript_id |
| | | | | | “AFH_NG17.1”; exon “2”; |
| chr1 7 | transcript | 77813452 | 77816523 | + | gene_id “AFH_NG18”; transcript_id |
| | | | | | “AFH_NG18.1”; RPKM “0.9375”; cov |
| | | | | | “10.4269”; |
| chr1 7 | exon | 77813452 | 77815330 | + | gene_id “AFH_NG18”; transcript_id |
| | | | | | “AFH_NG18.1”; exon “1”; |
| chr1 7 | exon | 77815460 | 77816523 | + | gene_id “AFH_NG18”; transcript_id |
| | | | | | “AFH_NG18.1”; exon “2”; |
| chr1 7 | transcript | 77813452 | 77816523 | + | gene_id “AFH_NG18”; transcript_id |
| | | | | | “AFH_NG18.2”; RPKM “8.0905”; cov |
| | | | | | “89.9834”; |
| chr17 | exon | 77813452 | 77816523 | + | gene_id “AFH_NG18”; transcript_id |
| | | | | | “AFH_NG18.2”; exon “1”; |
| chr19 | transcript | 9089290 | 9114010 | + | gene_id “AFH_NG19”; transcript_id |
| | | | | | “AFH_NG19.2”; RPKM “1.2534”; cov |
| | | | | | “13.9400”; |
| chr19 | exon | 9089290 | 9089931 | + | gene_id “AFH_NG19”; transcript_id |
| | | | | | “AFH_NG19.2”; exon “1”; |
| chr19 | exon | 9113063 | 9114010 | + | gene_id “AFH_NG19”; transcript_id |
| | | | | | “AFH_NG19.2”; exon “2”; |
| chr19 | transcript | 9114907 | 9120441 | + | gene_id “AFH_NG19”; transcript_id |
| | | | | | “AFH_NG19.1”; RPKM “1.8572”; cov |
| | | | | | “20.6563”; |
| chr1 9 | exon | 9114907 | 9120441 | + | gene_id “AFH_NG19”; transcript_id |
| | | | | | “AFH_NG19.1”; exon “1”; |
| chr22 | transcript | 35918439 | 35921521 | + | gene_id “AFH_NG20”; transcript_id |
| | | | | | “AFH_NG20.1”; RPKM “1.0768”; cov |
| | | | | | “11.9760”; |
| chr22 | exon | 35918439 | 35919124 | + | gene_id “AFH_NG20”; transcript_id |
| | | | | | “AFH_NG20.1”; exon “1”; |
| chr22 | exon | 35919943 | 35921521 | + | gene_id “AFH_NG20”; transcript_id |
| | | | | | “AFH_NG20.1”; exon “2”; |
| chr3 | transcript | 67141203 | 67229790 | + | gene_id “AFH_NG1”; transcript_id |
| | | | | | “AFH_NG1.2”; RPKM “1.4165”; cov |
| | | | | | “15.7549”; |
| chr3 | exon | 67141203 | 67141315 | + | gene_id “AFH_NG1”; transcript_id |
| | | | | | “AFH_NG1.2”; exon “1”; |
| chr3 | exon | 67224541 | 67224668 | + | gene_id “AFH_NG1”; transcript_id |
| | | | | | “AFH_NG1.2”; exon “2”; |
| chr3 | exon | 67226608 | 67227350 | + | gene_id “AFH_NG1”; transcript_id |
| | | | | | “AFH_NG1.2”; exon “3”; |
| chr3 | exon | 67227862 | 67229790 | + | gene_id “AFH_NG1”; transcript_id |
| | | | | | “AFH_NG1.2”; exon “4”; |
| chr3 | transcript | 67221043 | 67229790 | + | gene_id “AFH_NG1”; transcript_id |
| | | | | | “AFH_NG1.3”; RPKM “1.4170”; cov |
| | | | | | “15.7603”; |
| chr3 | exon | 67221043 | 67224335 | + | gene_id “AFH_NG1”; transcript_id |
| | | | | | “AFH_NG1.3”; exon “1”; |
| chr3 | exon | 67224541 | 67224668 | + | gene_id “AFH_NG1”; transcript_id |
| | | | | | “AFH_NG1.3”; exon “2”; |
| chr3 | exon | 67226608 | 67227350 | + | gene_id “AFH_NG1”; transcript_id |
| | | | | | “AFH_NG1.3”; exon “3”; |
| chr3 | exon | 67227862 | 67229790 | + | gene_id “AFH_NG1”; transcript_id |
| | | | | | “AFH_NG1.3”; exon “4”; |
| chr3 | transcript | 67240721 | 67244755 | + | gene_id “AFH_NG1”; transcript_id |
| | | | | | “AFH_NG1.1”; RPKM “3.2035”; cov |
| | | | | | “35.6300”; |
| chr3 | exon | 67240721 | 67244755 | + | gene_id “AFH_NG1”; transcript_id |
| | | | | | “AFH_NG1.1”; exon “1”; |
| chr5 | transcript | 15063076 | 15097733 | − | gene_id “AFH_NG2”; transcript_id |
| | | | | | “AFH_NG2.1”; RPKM “19.1635”; cov |
| | | | | | “213.1369”; |
| chr5 | exon | 15063076 | 15066397 | − | gene_id “AFH_NG2”; transcript_id |
| | | | | | “AFH_NG2.1”; exon “1”; |
| chr5 | exon | 15068595 | 15081814 | − | gene_id “AFH_NG2”; transcript_id |
| | | | | | “AFH_NG2.1”; exon “2”; |
| chr5 | exon | 15082978 | 15086448 | − | gene_id “AFH_NG2”; transcript_id |
| | | | | | “AFH_NG2.1”; exon “3”; |
| chr5 | exon | 15097230 | 15097733 | − | gene_id “AFH_NG2”; transcript_id |
| | | | | | “AFH_NG2.1”; exon “4”; |
| chr5 | transcript | 15063076 | 15097733 | − | gene_id “AFH_NG2”; transcript_id |
| | | | | | “AFH_NG2.2”; RPKM “25.0145”; cov |
| | | | | | “278.2129”; |
| chr5 | exon | 15063076 | 15066397 | − | gene_id “AFH_NG2”; transcript_id |
| | | | | | “AFH_NG2.2”; exon “1”; |
| chr5 | exon | 15068595 | 15086448 | − | gene_id “AFH_NG2”; transcript_id |
| | | | | | “AFH_NG2.2”; exon “2”; |
| chr5 | exon | 15097230 | 15097733 | − | gene_id “AFH_NG2”; transcript_id |
| | | | | | “AFH_NG2.2”; exon “3”; |
| chr5 | transcript | 15091700 | 15096714 | − | gene_id “AFH_NG3”; transcript_id |
| | | | | | “AFH_NG3.1”; RPKM “8.6436”; cov |
| | | | | | “96.1346”; |
| chr5 | exon | 15091700 | 15096714 | − | gene_id “AFH_NG3”; transcript_id |
| | | | | | “AFH_NG3.1”; exon “1”; |
| chr5 | transcript | 170062653 | 170070157 | + | gene_id “AFH_NG4”; transcript_id |
| | | | | | “AFH_NG4.1”; RPKM “2.8235”; cov |
| | | | | | “31.4032”; |
| chr5 | exon | 170062653 | 170070157 | + | gene_id “AFH_NG4”; transcript_id |
| | | | | | “AFH_NG4.1”; exon “1”; |
| chr8 | transcript | 123485229 | 123488871 | − | gene_id “AFH_NG7”; transcript_id |
| | | | | | “AFH_NG7.1”; RPKM “7.7204”; cov |
| | | | | | “85.8669”; |
| chr8 | exon | 123485229 | 123488871 | − | gene_id “AFH_NG7”; transcript_id |
| | | | | | “AFH_NG7.1”; exon “1”; |
| chr8 | transcript | 123639003 | 123640851 | − | gene_id “AFH_NG5”; transcript_id |
| | | | | | “AFH_NG5.1”; RPKM “3.2829”; cov |
| | | | | | “36.5122”; |
| chr8 | exon | 123639003 | 123640851 | − | gene_id “AFH_NG5”; transcript_id |
| | | | | | “AFH_NG5.1”; exon “1”; |
| chr8 | transcript | 123663969 | 123666843 | − | gene_id “AFH_NG6”; transcript_id |
| | | | | | “AFH_NG6.1”; RPKM “3.5461”; cov |
| | | | | | “39.4397”; |
| chr8 | exon | 123663969 | 123666843 | − | gene_id “AFH_NG6”; transcript_id |
| | | | | | “AFH_NG6.1”; exon “1”; |
| chr9 | transcript | 117706247 | 117762704 | − | gene_id “AFH_NG8”; transcript_id |
| | | | | | “AFH_NG8.1”; RPKM “3.6544”; cov |
| | | | | | “40.6447”; |
| chr9 | exon | 117706247 | 117706470 | − | gene_id “AFH_NG8”; transcript_id |
| | | | | | “AFH_NG8.1”; exon “1”; |
| chr9 | exon | 117715682 | 117715903 | − | gene_id “AFH_NG8”; transcript_id |
| | | | | | “AFH_NG8.1”; exon “2”; |
| chr9 | exon | 117762333 | 117762704 | − | gene_id “AFH_NG8”; transcript_id |
| | | | | | “AFH_NG8.1”; exon “3”; |
| chr9 | transcript | 117712105 | 117762704 | − | gene_id “AFH_NG8”; transcript_id |
| | | | | | “AFH_NG8.2”; RPKM “2.8967”; cov |
| | | | | | “32.2169”; |
| chr9 | exon | 117712105 | 117715903 | − | gene_id “AFH_NG8”; transcript_id |
| | | | | | “AFH_NG8.2”; exon “1”; |
| chr9 | exon | 117762333 | 117762704 | − | gene_id “AFH_NG8”; transcript_id |
| | | | | | “AFH_NG8.2”; exon “2”; |
| chr1 | transcript | 201147343 | 201157055 | − | gene_id “ASPS_NG1”; transcript_id |
| | | | | | “ASPS_NG1.2”; RPKM “3.3560”; cov |
| | | | | | “44.4954”; |
| chr1 | exon | 201147343 | 201150774 | − | gene_id “ASPS_NG1”; transcript_id |
| | | | | | “ASPS_NG1.2”; exon “1”; |
| chr1 | exon | 201155753 | 201155909 | − | gene_id “ASPS_NG1”; transcript_id |
| | | | | | “ASPS_NG1.2”; exon “2”; |
| chr1 | exon | 201157033 | 201157055 | − | gene_id “ASPS_NG1”; transcript_id |
| | | | | | “ASPS_NG1.2”; exon “3”; |
| chr1 | transcript | 201155105 | 201157055 | − | gene_id “ASPS_NG1”; transcript_id |
| | | | | | “ASPS_NG1.1”; RPKM “0.7948”; cov |
| | | | | | “10.5373”; |
| chr1 | exon | 201155105 | 201155909 | − | gene_id “ASPS_NG1”; transcript_id |
| | | | | | “ASPS_NG1.1”; exon “1”; |
| chr1 | exon | 201157033 | 201157055 | − | gene_id “ASPS_NG1”; transcript_id |
| | | | | | “ASPS_NG1.1”; exon “2”; |
| chr1 | transcript | 222181182 | 222182054 | − | gene_id “ASPS_NG2”; transcript_id |
| | | | | | “ASPS_NG2.1”; RPKM “5.6644”; cov |
| | | | | | “75.1008”; |
| chr1 | exon | 222181182 | 222182054 | − | gene_id “ASPS_NG2”; transcript_id |
| | | | | | “ASPS_NG2.1”; exon “1”; |
| chr10 | transcript | 47657110 | 47671291 | − | gene_id “ASPS_NG23”; transcript_id |
| | | | | | “ASPS_NG23.1”; RPKM “12.5628”; cov |
| | | | | | “166.5635”; |
| chr10 | exon | 47657110 | 47667516 | − | gene_id “ASPS_NG23”; transcript_id |
| | | | | | “ASPS_NG23.1”; exon “1”; |
| chr10 | exon | 47670549 | 47671291 | − | gene_id “ASPS_NG23”; transcript_id |
| | | | | | “ASPS_NG23.1”; exon “2”; |
| chr10 | transcript | 47657110 | 47671291 | − | gene_id “ASPS_NG23”; transcript_id |
| | | | | | “ASPS_NG23.2”; RPKM “1.5928”; cov |
| | | | | | “21.1180”; |
| chr10 | exon | 47657110 | 47671291 | − | gene_id “ASPS_NG23”; transcript_id |
| | | | | | “ASPS_NG23.2”; exon “1”; |
| chr10 | transcript | 73632708 | 73633978 | + | gene_id “ASPS_NG24”; transcript_id |
| | | | | | “ASPS_NG24.1”; RPKM “1.1933”; cov |
| | | | | | “15.8214”; |
| chr10 | exon | 73632708 | 73632841 | + | gene_id “ASPS_NG24”; transcript_id |
| | | | | | “ASPS_NG24.1”; exon “1”; |
| chr10 | exon | 73633342 | 73633978 | + | gene_id “ASPS_NG24”; transcript_id |
| | | | | | “ASPS_NG24.1”; exon “2”; |
| chr10 | transcript | 134197448 | 134200655 | − | gene_id “ASPS_NG25”; transcript_id |
| | | | | | “ASPS_NG25.1”; RPKM “3.4364”; cov |
| | | | | | “45.5608”; |
| chr10 | exon | 134197448 | 134200655 | − | gene_id “ASPS_NG25”; transcript_id |
| | | | | | “ASPS_NG25.1”; exon “1”; |
| chr10 | transcript | 134202353 | 134205682 | − | gene_id “ASPS_NG26”; transcript_id |
| | | | | | “ASPS_NG26.1”; RPKM “2.5685”; cov |
| | | | | | “34.0538”; |
| chr10 | exon | 134202353 | 134205682 | − | gene_id “ASPS_NG26”; transcript_id |
| | | | | | “ASPS_NG26.1”; exon “1”; |
| chr10 | transcript | 134206139 | 134210244 | − | gene_id “ASPS_NG27”; transcript_id |
| | | | | | “ASPS_NG27.1”; RPKM “2.0637”; cov |
| | | | | | “27.3609”; |
| chr10 | exon | 134206139 | 134207470 | − | gene_id “ASPS_NG27”; transcript_id |
| | | | | | “ASPS_NG27.1”; exon “1”; |
| chr10 | exon | 134207774 | 134207834 | − | gene_id “ASPS_NG27”; transcript_id |
| | | | | | “ASPS_NG27.1”; exon “2”; |
| chr10 | exon | 134208165 | 134208375 | − | gene_id “ASPS_NG27”; transcript_id |
| | | | | | “ASPS_NG27.1”; exon “3”; |
| chr10 | exon | 134209384 | 134210244 | − | gene_id “ASPS_NG27”; transcript_id |
| | | | | | “ASPS_NG27.1”; exon “4”; |
| chr10 | transcript | 134206139 | 134210244 | − | gene_id “ASPS_NG27”; transcript_id |
| | | | | | “ASPS_NG27.2”; RPKM “2.2388”; cov |
| | | | | | “29.6833”; |
| chr10 | exon | 134206139 | 134207470 | − | gene_id “ASPS_NG27”; transcript_id |
| | | | | | “ASPS_NG27.2”; exon “1”; |
| chr10 | exon | 134207774 | 134207834 | − | gene_id “ASPS_NG27”; transcript_id |
| | | | | | “ASPS_NG27.2”; exon “2”; |
| chr10 | exon | 134208165 | 134210244 | − | gene_id “ASPS_NG27”; transcript_id |
| | | | | | “ASPS_NG27.2”; exon “3”; |
| chr10 | transcript | 134206139 | 134210244 | − | gene_id “ASPS_NG27”; transcript_id |
| | | | | | “ASPS_NG27.3”; RPKM “0.9150”; cov |
| | | | | | “12.1308”; |
| chr10 | exon | 134206139 | 134207470 | − | gene_id “ASPS_NG27”; transcript_id |
| | | | | | “ASPS_NG27.3”; exon “1”; |
| chr10 | exon | 134208165 | 134210244 | − | gene_id “ASPS_NG27”; transcript_id |
| | | | | | “ASPS_NG27.3”; exon “2”; |
| chr10 | transcript | 134206139 | 134210244 | − | gene_id “ASPS_NG27”; transcript_id |
| | | | | | “ASPS_NG27.4”; RPKM “3.6605”; cov |
| | | | | | “48.5324”; |
| chr10 | exon | 134206139 | 134210244 | − | gene_id “ASPS_NG27”; transcript_id |
| | | | | | “ASPS_NG27.4”; exon “1”; |
| chr10 | transcript | 134206139 | 134210244 | − | gene_id “ASPS_NG27”; transcript_id |
| | | | | | “ASPS_NG27.5”; RPKM “5.1391”; cov |
| | | | | | “68.1367”; |
| chr10 | exon | 134206139 | 134207470 | − | gene_id “ASPS_NG27”; transcript_id |
| | | | | | “ASPS_NG27.5”; exon “1”; |
| chr10 | exon | 134207774 | 134210244 | − | gene_id “ASPS_NG27”; transcript_id |
| | | | | | “ASPS_NG27.5”; exon “2”; |
| chr10 | transcript | 134210711 | 134211528 | − | gene_id “ASPS_NG28”; transcript_id |
| | | | | | “ASPS_NG28.1”; RPKM “3.9826”; cov |
| | | | | | “52.8029”; |
| chr10 | exon | 134210711 | 134211528 | − | gene_id “ASPS_NG28”; transcript_id |
| | | | | | “ASPS_NG28.1”; exon “1”; |
| chr11 | transcript | 99924000 | 100217666 | − | gene_id “ASPS_NG29”; transcript_id |
| | | | | | “ASPS_NG29.5”; RPKM “0.7870”; cov |
| | | | | | “10.4344”; |
| chr11 | exon | 99924000 | 99925375 | − | gene_id “ASPS_NG29”; transcript_id |
| | | | | | “ASPS_NG29.5”; exon “1”; |
| chr11 | exon | 99925648 | 99925758 | − | gene_id “ASPS_NG29”; transcript_id |
| | | | | | “ASPS_NG29.5”; exon “2”; |
| chr11 | exon | 99926128 | 99926262 | − | gene_id “ASPS_NG29”; transcript_id |
| | | | | | “ASPS_NG29.5”; exon “3”; |
| chr11 | exon | 99976767 | 99976891 | − | gene_id “ASPS_NG29”; transcript_id |
| | | | | | “ASPS_NG29.5”; exon “4”; |
| chr11 | exon | 99984667 | 99984894 | − | gene_id “ASPS_NG29”; transcript_id |
| | | | | | “ASPS_NG29.5”; exon “5”; |
| chr11 | exon | 100000960 | 100001126 | − | gene_id “ASPS_NG29”; transcript_id |
| | | | | | “ASPS_NG29.5”; exon “6”; |
| chr11 | exon | 100007599 | 100007654 | − | gene_id “ASPS_NG29”; transcript_id |
| | | | | | “ASPS_NG29.5”; exon “7”; |
| chr11 | exon | 100010471 | 100010574 | − | gene_id “ASPS_NG29”; transcript_id |
| | | | | | “ASPS_NG29.5”; exon “8”; |
| chr11 | exon | 100174163 | 100174228 | − | gene_id “ASPS_NG29”; transcript_id |
| | | | | | “ASPS_NG29.5”; exon “9”; |
| chr11 | exon | 100217587 | 100217666 | − | gene_id “ASPS_NG29”; transcript_id |
| | | | | | “ASPS_NG29.5”; exon “10”; |
| chr11 | transcript | 99978045 | 100217666 | − | gene_id “ASPS_NG29”; transcript_id |
| | | | | | “ASPS_NG29.6”; RPKM “2.8095”; cov |
| | | | | | “37.2493”; |
| chr11 | exon | 99978045 | 99980154 | − | gene_id “ASPS_NG29”; transcript_id |
| | | | | | “ASPS_NG29.6”; exon “1”; |
| chr11 | exon | 99984667 | 99984894 | − | gene_id “ASPS_NG29”; transcript_id |
| | | | | | “ASPS_NG29.6”; exon “2”; |
| chr11 | exon | 100000960 | 100001126 | − | gene_id “ASPS_NG29”; transcript_id |
| | | | | | “ASPS_NG29.6”; exon “3”; |
| chr11 | exon | 100007599 | 100007654 | − | gene_id “ASPS_NG29”; transcript_id |
| | | | | | “ASPS_NG29.6”; exon “4”; |
| chr11 | exon | 100010471 | 100010574 | − | gene_id “ASPS_NG29”; transcript_id |
| | | | | | “ASPS_NG29.6”; exon “5”; |
| chr11 | exon | 100174163 | 100174228 | − | gene_id “ASPS_NG29”; transcript_id |
| | | | | | “ASPS_NG29.6”; exon “6”; |
| chr11 | exon | 100217587 | 100217666 | − | gene_id “ASPS_NG29”; transcript_id |
| | | | | | “ASPS_NG29.6”; exon “7”; |
| chr11 | transcript | 99978045 | 100217666 | − | gene_id “ASPS_NG29”; transcript_id |
| | | | | | “ASPS_NG29.4”; RPKM “5.2036”; cov |
| | | | | | “68.9913”; |
| chr11 | exon | 99978045 | 99980154 | − | gene_id “ASPS_NG29”; transcript_id |
| | | | | | “ASPS_NG29.4”; exon “1”; |
| chr11 | exon | 99984667 | 99984894 | − | gene_id “ASPS_NG29”; transcript_id |
| | | | | | “ASPS_NG29.4”; exon “2”; |
| chr11 | exon | 99985662 | 99985832 | − | gene_id “ASPS_NG29”; transcript_id |
| | | | | | “ASPS_NG29.4”; exon “3”; |
| chr11 | exon | 100000960 | 100001126 | − | gene_id “ASPS_NG29”; transcript_id |
| | | | | | “ASPS_NG29.4”; exon “4”; |
| chr11 | exon | 100007599 | 100007654 | − | gene_id “ASPS_NG29”; transcript_id |
| | | | | | “ASPS_NG29.4”; exon “5”; |
| chr11 | exon | 100010471 | 100010574 | − | gene_id “ASPS_NG29”; transcript_id |
| | | | | | “ASPS_NG29.4”; exon “6”; |
| chr11 | exon | 100174163 | 100174228 | − | gene_id “ASPS_NG29”; transcript_id |
| | | | | | “ASPS_NG29.4”; exon “7”; |
| chr11 | exon | 100217587 | 100217666 | − | gene_id “ASPS_NG29”; transcript_id |
| | | | | | “ASPS_NG29.4”; exon “8”; |
| chr11 | transcript | 99978045 | 100216028 | − | gene_id “ASPS_NG29”; transcript_id |
| | | | | | “ASPS_NG29.3”; RPKM “1.8790”; cov |
| | | | | | “24.9125”; |
| chr11 | exon | 99978045 | 99980154 | − | gene_id “ASPS_NG29”; transcript_id |
| | | | | | “ASPS_NG29.3”; exon “1”; |
| chr11 | exon | 99984667 | 99984894 | − | gene_id “ASPS_NG29”; transcript_id |
| | | | | | “ASPS_NG29.3”; exon “2”; |
| chr11 | exon | 99985662 | 99985832 | − | gene_id “ASPS_NG29”; transcript_id |
| | | | | | “ASPS_NG29.3”; exon “3”; |
| chr11 | exon | 100007599 | 100007654 | − | gene_id “ASPS_NG29”; transcript_id |
| | | | | | “ASPS_NG29.3”; exon “4”; |
| chr11 | exon | 100010471 | 100010574 | − | gene_id “ASPS_NG29”; transcript_id |
| | | | | | “ASPS_NG29.3”; exon “5”; |
| chr11 | exon | 100174163 | 100174228 | − | gene_id “ASPS_NG29”; transcript_id |
| | | | | | “ASPS_NG29.3”; exon “6”; |
| chr11 | exon | 100215879 | 100216028 | − | gene_id “ASPS_NG29”; transcript_id |
| | | | | | “ASPS_NG29.3”; exon “7”; |
| chr11 | transcript | 100020238 | 100217666 | − | gene_id “ASPS_NG29”; transcript_id |
| | | | | | “ASPS_NG29.2”; RPKM “5.5298”; cov |
| | | | | | “73.3161”; |
| chr11 | exon | 100020238 | 100020906 | − | gene_id “ASPS_NG29”; transcript_id |
| | | | | | “ASPS_NG29.2”; exon “1”; |
| chr11 | exon | 100174163 | 100174228 | − | gene_id “ASPS_NG29”; transcript_id |
| | | | | | “ASPS_NG29.2”; exon “2”; |
| chr11 | exon | 100217587 | 100217666 | − | gene_id “ASPS_NG29”; transcript_id |
| | | | | | “ASPS_NG29.2”; exon “3”; |
| chr11 | transcript | 100020238 | 100216028 | − | gene_id “ASPS_NG29”; transcript_id |
| | | | | | “ASPS_NG29.1”; RPKM “2.0420”; cov |
| | | | | | “27.0740”; |
| chr11 | exon | 100020238 | 100020906 | − | gene_id “ASPS_NG29”; transcript_id |
| | | | | | “ASPS_NG29.1”; exon “1”; |
| chr11 | exon | 100174163 | 100174228 | − | gene_id “ASPS_NG29”; transcript_id |
| | | | | | “ASPS_NG29.1”; exon “2”; |
| chr11 | exon | 100215879 | 100216028 | − | gene_id “ASPS_NG29”; transcript_id |
| | | | | | “ASPS_NG29.1”; exon “3”; |
| chr13 | transcript | 90809686 | 90858367 | − | gene_id “ASPS_NG30”; transcript_id |
| | | | | | “ASPS_NG30.4”; RPKM “1.1466”; cov |
| | | | | | “15.2025”; |
| chr13 | exon | 90809686 | 90810047 | − | gene_id “ASPS_NG30”; transcript_id |
| | | | | | “ASPS_NG30.4”; exon “1”; |
| chr13 | exon | 90835751 | 90835923 | − | gene_id “ASPS_NG30”; transcript_id |
| | | | | | “ASPS_NG30.4”; exon “2”; |
| chr13 | exon | 90836930 | 90837000 | − | gene_id “ASPS_NG30”; transcript_id |
| | | | | | “ASPS_NG30.4”; exon “3”; |
| chr13 | exon | 90839026 | 90839162 | − | gene_id “ASPS_NG30”; transcript_id |
| | | | | | “ASPS_NG30.4”; exon “4”; |
| chr13 | exon | 90858239 | 90858367 | − | gene_id “ASPS_NG30”; transcript_id |
| | | | | | “ASPS_NG30.4”; exon “5”; |
| chr13 | transcript | 90825311 | 90858367 | − | gene_id “ASPS_NG30”; transcript_id |
| | | | | | “ASPS_NG30.3”; RPKM “0.7944”; cov |
| | | | | | “10.5322”; |
| chr13 | exon | 90825311 | 90827199 | − | gene_id “ASPS_NG30”; transcript_id |
| | | | | | “ASPS_NG30.3”; exon “1”; |
| chr13 | exon | 90835751 | 90835923 | − | gene_id “ASPS_NG30”; transcript_id |
| | | | | | “ASPS_NG30.3”; exon “2”; |
| chr13 | exon | 90836930 | 90837000 | − | gene_id “ASPS_NG30”; transcript_id |
| | | | | | “ASPS_NG30.3”; exon “3”; |
| chr13 | exon | 90839026 | 90839162 | − | gene_id “ASPS_NG30”; transcript_id |
| | | | | | “ASPS_NG30.3”; exon “4”; |
| chr13 | exon | 90858239 | 90858367 | − | gene_id “ASPS_NG30”; transcript_id |
| | | | | | “ASPS_NG30.3”; exon “5”; |
| chr13 | transcript | 90829372 | 90858367 | − | gene_id “ASPS_NG30”; transcript_id |
| | | | | | “ASPS_NG30.1”; RPKM “1.3676”; cov |
| | | | | | “18.1325”; |
| chr13 | exon | 90829372 | 90829985 | − | gene_id “ASPS_NG30”; transcript_id |
| | | | | | “ASPS_NG30.1”; exon “1”; |
| chr13 | exon | 90835751 | 90835923 | − | gene_id “ASPS_NG30”; transcript_id |
| | | | | | “ASPS_NG30.1”; exon “2”; |
| chr13 | exon | 90836930 | 90837000 | − | gene_id “ASPS_NG30”; transcript_id |
| | | | | | “ASPS_NG30.1”; exon “3”; |
| chr13 | exon | 90858239 | 90858367 | − | gene_id “ASPS_NG30”; transcript_id |
| | | | | | “ASPS_NG30.1”; exon “4”; |
| chr13 | transcript | 90829372 | 90858367 | − | gene_id “ASPS_NG30”; transcript_id |
| | | | | | “ASPS_NG30.5”; RPKM “5.5499”; cov |
| | | | | | “73.5832”; |
| chr13 | exon | 90829372 | 90829985 | − | gene_id “ASPS_NG30”; transcript_id |
| | | | | | “ASPS_NG30.5”; exon “1”; |
| chr13 | exon | 90835751 | 90835923 | − | gene_id “ASPS_NG30”; transcript_id |
| | | | | | “ASPS_NG30.5”; exon “2”; |
| chr13 | exon | 90836930 | 90837000 | − | gene_id “ASPS_NG30”; transcript_id |
| | | | | | “ASPS_NG30.5”; exon “3”; |
| chr13 | exon | 90839026 | 90839162 | − | gene_id “ASPS_NG30”; transcript_id |
| | | | | | “ASPS_NG30.5”; exon “4”; |
| chr13 | exon | 90858239 | 90858367 | − | gene_id “ASPS_NG30”; transcript_id |
| | | | | | “ASPS_NG30.5”; exon “5”; |
| chr13 | transcript | 90834817 | 90858367 | − | gene_id “ASPS_NG30”; transcript_id |
| | | | | | “ASPS_NG30.2”; RPKM “1.3777”; cov |
| | | | | | “18.2667”; |
| chr13 | exon | 90834817 | 90835923 | − | gene_id “ASPS_NG30”; transcript_id |
| | | | | | “ASPS_NG30.2”; exon “1”; |
| chr13 | exon | 90836930 | 90837000 | − | gene_id “ASPS_NG30”; transcript_id |
| | | | | | “ASPS_NG30.2”; exon “2”; |
| chr13 | exon | 90839026 | 90839162 | − | gene_id “ASPS_NG30”; transcript_id |
| | | | | | “ASPS_NG30.2”; exon “3”; |
| chr13 | exon | 90858239 | 90858367 | − | gene_id “ASPS_NG30”; transcript_id |
| | | | | | “ASPS_NG30.2”; exon “4”; |
| chr17 | transcript | 884526 | 886818 | − | gene_id “ASPS_NG31”; transcript_id |
| | | | | | “ASPS_NG31.1”; RPKM “9.1903”; cov |
| | | | | | “121.8487”; |
| chr17 | exon | 884526 | 886818 | − | gene_id “ASPS_NG31”; transcript_id |
| | | | | | “ASPS_NG31.1”; exon “1”; |
| chr17 | transcript | 886855 | 892420 | − | gene_id “ASPS_NG32”; transcript_id |
| | | | | | “ASPS_NG32.1”; RPKM “4.5389”; cov |
| | | | | | “60.1788”; |
| chr17 | exon | 886855 | 892420 | − | gene_id “ASPS_NG32”; transcript_id |
| | | | | | “ASPS_NG32.1”; exon “1”; |
| chr2 | transcript | 180266 | 186655 | + | gene_id “ASPS_NG3”; transcript_id |
| | | | | | “ASPS_NG3.2”; RPKM “2.1870”; cov |
| | | | | | “28.9955”; |
| chr2 | exon | 180266 | 180670 | + | gene_id “ASPS_NG3”; transcript_id |
| | | | | | “ASPS_NG3.2”; exon “1”; |
| chr2 | exon | 184874 | 184969 | + | gene_id “ASPS_NG3”; transcript_id |
| | | | | | “ASPS_NG3.2”; exon “2”; |
| chr2 | exon | 186314 | 186655 | + | gene_id “ASPS_NG3”; transcript_id |
| | | | | | “ASPS_NG3.2”; exon “3”; |
| chr2 | transcript | 204337 | 211384 | + | gene_id “ASPS_NG3”; transcript_id |
| | | | | | “ASPS_NG3.1”; RPKM “3.1220”; cov |
| | | | | | “41.3928”; |
| chr2 | exon | 204337 | 204388 | + | gene_id “ASPS_NG3”; transcript_id |
| | | | | | “ASPS_NG3.1”; exon “1”; |
| chr2 | exon | 209485 | 211384 | + | gene_id “ASPS_NG3”; transcript_id |
| | | | | | “ASPS_NG3.1”; exon “2”; |
| chr2 | transcript | 21116965 | 21117794 | + | gene_id “ASPS_NG4”; transcript_id |
| | | | | | “ASPS_NG4.1”; RPKM “1.6680”; cov |
| | | | | | “22.1144”; |
| chr2 | exon | 21116965 | 21117097 | + | gene_id “ASPS_NG4”; transcript_id |
| | | | | | “ASPS_NG4.1”; exon “1”; |
| chr2 | exon | 21117283 | 21117794 | + | gene_id “ASPS_NG4”; transcript_id |
| | | | | | “ASPS_NG4.1”; exon “2”; |
| chr2 | transcript | 23941529 | 23944173 | − | gene_id “ASPS_NG5”; transcript_id |
| | | | | | “ASPS_NG5.1”; RPKM “3.8692”; cov |
| | | | | | “51.3000”; |
| chr2 | exon | 23941529 | 23944173 | − | gene_id “ASPS_NG5”; transcript_id |
| | | | | | “ASPS_NG5.1”; exon “1”; |
| chr2 | transcript | 151555817 | 151669720 | − | gene_id “ASPS_NG6”; transcript_id |
| | | | | | “ASPS_NG6.3”; RPKM “0.9263”; cov |
| | | | | | “12.2815”; |
| chr2 | exon | 151555817 | 151555980 | − | gene_id “ASPS_NG6”; transcript_id |
| | | | | | “ASPS_NG6.3”; exon “1”; |
| chr2 | exon | 151564915 | 151565082 | − | gene_id “ASPS_NG6”; transcript_id |
| | | | | | “ASPS_NG6.3”; exon “2”; |
| chr2 | exon | 151669618 | 151669720 | − | gene_id “ASPS_NG6”; transcript_id |
| | | | | | “ASPS_NG6.3”; exon “3”; |
| chr2 | transcript | 151555817 | 151669720 | − | gene_id “ASPS_NG6”; transcript_id |
| | | | | | “ASPS_NG6.4”; RPKM “1.7786”; cov |
| | | | | | “23.5810”; |
| chr2 | exon | 151555817 | 151555980 | − | gene_id “ASPS_NG6”; transcript_id |
| | | | | | “ASPS_NG6.4”; exon “1”; |
| chr2 | exon | 151564915 | 151565082 | − | gene_id “ASPS_NG6”; transcript_id |
| | | | | | “ASPS_NG6.4”; exon “2”; |
| chr2 | exon | 151668506 | 151668771 | − | gene_id “ASPS_NG6”; transcript_id |
| | | | | | “ASPS_NG6.4”; exon “3”; |
| chr2 | exon | 151669618 | 151669720 | − | gene_id “ASPS_NG6”; transcript_id |
| | | | | | “ASPS_NG6.4”; exon “4”; |
| chr2 | transcript | 151555817 | 151669720 | − | gene_id “ASPS_NG6”; transcript_id |
| | | | | | “ASPS_NG6.5”; RPKM “2.2600”; cov |
| | | | | | “29.9639”; |
| chr2 | exon | 151555817 | 151555980 | − | gene_id “ASPS_NG6”; transcript_id |
| | | | | | “ASPS_NG6.5”; exon “1”; |
| chr2 | exon | 151564915 | 151565082 | − | gene_id “ASPS_NG6”; transcript_id |
| | | | | | “ASPS_NG6.5”; exon “2”; |
| chr2 | exon | 151668506 | 151668719 | − | gene_id “ASPS_NG6”; transcript_id |
| | | | | | “ASPS_NG6.5”; exon “3”; |
| chr2 | exon | 151669618 | 151669720 | − | gene_id “ASPS_NG6”; transcript_id |
| | | | | | “ASPS_NG6.5”; exon “4”; |
| chr2 | transcript | 151664180 | 151669720 | − | gene_id “ASPS_NG6”; transcript_id |
| | | | | | “ASPS_NG6.1”; RPKM “1.5241”; cov |
| | | | | | “20.2072”; |
| chr2 | exon | 151664180 | 151668635 | − | gene_id “ASPS_NG6”; transcript_id |
| | | | | | “ASPS_NG6.1”; exon “1”; |
| chr2 | exon | 151669618 | 151669720 | − | gene_id “ASPS_NG6”; transcript_id |
| | | | | | “ASPS_NG6.1”; exon “2”; |
| chr2 | transcript | 151664180 | 151669720 | − | gene_id “ASPS_NG6”; transcript_id |
| | | | | | “ASPS_NG6.2”; RPKM “1.9095”; cov |
| | | | | | “25.3172”; |
| chr2 | exon | 151664180 | 151667376 | − | gene_id “ASPS_NG6”; transcript_id |
| | | | | | “ASPS_NG6.2”; exon “1”; |
| chr2 | exon | 151668506 | 151668719 | − | gene_id “ASPS_NG6”; transcript_id |
| | | | | | “ASPS_NG6.2”; exon “2”; |
| chr2 | exon | 151669618 | 151669720 | − | gene_id “ASPS_NG6”; transcript_id |
| | | | | | “ASPS_NG6.2”; exon “3”; |
| chr20 | transcript | 3061971 | 3069430 | + | gene_id “ASPS_NG33”; transcript_id |
| | | | | | “ASPS_NG33.1”; RPKM “1.4885”; cov |
| | | | | | “19.7356”; |
| chr20 | exon | 3061971 | 3062371 | + | gene_id “ASPS_NG33”; transcript_id |
| | | | | | “ASPS_NG33.1”; exon “1”; |
| chr20 | exon | 3068860 | 3069430 | + | gene_id “ASPS_NG33”; transcript_id |
| | | | | | “ASPS_NG33.1”; exon “2”; |
| chr3 | transcript | 12925178 | 12984474 | + | gene_id “ASPS_NG7”; transcript_id |
| | | | | | “ASPS_NG7.1”; RPKM “1.4348”; cov |
| | | | | | “19.0230”; |
| chr3 | exon | 12925178 | 12925504 | + | gene_id “ASPS_NG7”; transcript_id |
| | | | | | “ASPS_NG7.1”; exon “1”; |
| chr3 | exon | 12984324 | 12984474 | + | gene_id “ASPS_NG7”; transcript_id |
| | | | | | “ASPS_NG7.1”; exon “2”; |
| chr3 | transcript | 15383020 | 15412040 | + | gene_id “ASPS_NG8”; transcript_id |
| | | | | | “ASPS_NG8.1”; RPKM “14.2407”; cov |
| | | | | | “188.8098”; |
| chr3 | exon | 15383020 | 15383151 | + | gene_id “ASPS_NG8”; transcript_id |
| | | | | | “ASPS_NG8.1”; exon “1”; |
| chr3 | exon | 15400598 | 15400730 | + | gene_id “ASPS_NG8”; transcript_id |
| | | | | | “ASPS_NG8.1”; exon “2”; |
| chr3 | exon | 15403312 | 15412040 | + | gene_id “ASPS_NG8”; transcript_id |
| | | | | | “ASPS_NG8.1”; exon “3”; |
| chr3 | transcript | 15383020 | 15387151 | + | gene_id “ASPS_NG8”; transcript_id |
| | | | | | “ASPS_NG8.2”; RPKM “86.3023”; cov |
| | | | | | “1144.2316”; |
| chr3 | exon | 15383020 | 15383151 | + | gene_id “ASPS_NG8”; transcript_id |
| | | | | | “ASPS_NG8.2”; exon “1”; |
| chr3 | exon | 15385004 | 15387151 | + | gene_id “ASPS_NG8”; transcript_id |
| | | | | | “ASPS_NG8.2”; exon “2”; |
| chr3 | transcript | 32122887 | 32130810 | − | gene_id “ASPS_NG9”; transcript_id |
| | | | | | “ASPS_NG9.1”; RPKM “1.0641”; cov |
| | | | | | “14.1087”; |
| chr3 | exon | 32122887 | 32123487 | − | gene_id “ASPS_NG9”; transcript_id |
| | | | | | “ASPS_NG9.1”; exon “1”; |
| chr3 | exon | 32130480 | 32130810 | − | gene_id “ASPS_NG9”; transcript_id |
| | | | | | “ASPS_NG9.1”; exon “2”; |
| chr3 | transcript | 32122887 | 32130810 | − | gene_id “ASPS_NG9”; transcript_id |
| | | | | | “ASPS_NG9.2”; RPKM “3.8198”; cov |
| | | | | | “50.6445”; |
| chr3 | exon | 32122887 | 32130810 | − | gene_id “ASPS_NG9”; transcript_id |
| | | | | | “ASPS_NG9.2”; exon “1”; |
| chr3 | transcript | 42487320 | 42520982 | + | gene_id “ASPS_NG10”; transcript_id |
| | | | | | “ASPS_NG10.1”; RPKM “1.2629”; cov |
| | | | | | “16.7434”; |
| chr3 | exon | 42487320 | 42487400 | + | gene_id “ASPS_NG10”; transcript_id |
| | | | | | “ASPS_NG10.1”; exon “1”; |
| chr3 | exon | 42495101 | 42495193 | + | gene_id “ASPS_NG10”; transcript_id |
| | | | | | “ASPS_NG10.1”; exon “2”; |
| chr3 | exon | 42514879 | 42515017 | + | gene_id “ASPS_NG10”; transcript_id |
| | | | | | “ASPS_NG10.1”; exon “3”; |
| chr3 | exon | 42515110 | 42520982 | + | gene_id “ASPS_NG10”; transcript_id |
| | | | | | “ASPS_NG10.1”; exon “4”; |
| chr3 | transcript | 42487320 | 42520982 | + | gene_id “ASPS_NG10”; transcript_id |
| | | | | | “ASPS_NG10.2”; RPKM “1.8681”; cov |
| | | | | | “24.7680”; |
| chr3 | exon | 42487320 | 42487400 | + | gene_id “ASPS_NG10”; transcript_id |
| | | | | | “ASPS_NG10.2”; exon “1”; |
| chr3 | exon | 42495101 | 42495193 | + | gene_id “ASPS_NG10”; transcript_id |
| | | | | | “ASPS_NG10.2”; exon “2”; |
| chr3 | exon | 42514879 | 42515017 | + | gene_id “ASPS_NG10”; transcript_id |
| | | | | | “ASPS_NG10.2”; exon “3”; |
| chr3 | exon | 42516185 | 42520982 | + | gene_id “ASPS_NG10”; transcript_id |
| | | | | | “ASPS_NG10.2”; exon “4”; |
| chr3 | transcript | 42487320 | 42520982 | + | gene_id “ASPS_NG10”; transcript_id |
| | | | | | “ASPS_NG10.3”; RPKM “3.6655”; cov |
| | | | | | “48.5982”; |
| chr3 | exon | 42487320 | 42487400 | + | gene_id “ASPS_NG10”; transcript_id |
| | | | | | “ASPS_NG10.3”; exon “1”; |
| chr3 | exon | 42495101 | 42495193 | + | gene_id “ASPS_NG10”; transcript_id |
| | | | | | “ASPS_NG10.3”; exon “2”; |
| chr3 | exon | 42514879 | 42520982 | + | gene_id “ASPS_NG10”; transcript_id |
| | | | | | “ASPS_NG10.3”; exon “3”; |
| chr3 | transcript | 42487320 | 42520982 | + | gene_id “ASPS_NG10”; transcript_id |
| | | | | | “ASPS_NG10.4”; RPKM “1.0101”; cov |
| | | | | | “13.3928”; |
| chr3 | exon | 42487320 | 42487400 | + | gene_id “ASPS_NG10”; transcript_id |
| | | | | | “ASPS_NG10.4”; exon “1”; |
| chr3 | exon | 42495101 | 42495193 | + | gene_id “ASPS_NG10”; transcript_id |
| | | | | | “ASPS_NG10.4”; exon “2”; |
| chr3 | exon | 42513841 | 42520982 | + | gene_id “ASPS_NG10”; transcript_id |
| | | | | | “ASPS_NG10.4”; exon “3”; |
| chr3 | transcript | 46095612 | 46127414 | − | gene_id “ASPS_NG11”; transcript_id |
| | | | | | “ASPS_NG11.3”; RPKM “0.8976”; cov |
| | | | | | “11.9009”; |
| chr3 | exon | 46095612 | 46095875 | − | gene_id “ASPS_NG11”; transcript_id |
| | | | | | “ASPS_NG11.3”; exon “1”; |
| chr3 | exon | 46108391 | 46108470 | − | gene_id “ASPS_NG11”; transcript_id |
| | | | | | “ASPS_NG11.3”; exon “2”; |
| chr3 | exon | 46127286 | 46127414 | − | gene_id “ASPS_NG11”; transcript_id |
| | | | | | “ASPS_NG11.3”; exon “3”; |
| chr3 | transcript | 46102539 | 46127414 | − | gene_id “ASPS_NG11”; transcript_id |
| | | | | | “ASPS_NG11.9”; RPKM “2.7665”; cov |
| | | | | | “36.6800”; |
| chr3 | exon | 46102539 | 46103187 | − | gene_id “ASPS_NG11”; transcript_id |
| | | | | | “ASPS_NG11.9”; exon “1”; |
| chr3 | exon | 46108391 | 46108470 | − | gene_id “ASPS_NG11”; transcript_id |
| | | | | | “ASPS_NG11.9”; exon “2”; |
| chr3 | exon | 46116143 | 46116207 | − | gene_id “ASPS_NG11”; transcript_id |
| | | | | | “ASPS_NG11.9”; exon “3”; |
| chr3 | exon | 46127286 | 46127414 | − | gene_id “ASPS_NG11”; transcript_id |
| | | | | | “ASPS_NG11.9”; exon “4”; |
| chr3 | transcript | 46102539 | 46127414 | − | gene_id “ASPS_NG11”; transcript_id |
| | | | | | “ASPS_NG11.8”; RPKM “1.0028”; cov |
| | | | | | “13.2957”; |
| chr3 | exon | 46102539 | 46103187 | − | gene_id “ASPS_NG11”; transcript_id |
| | | | | | “ASPS_NG11.8”; exon “1”; |
| chr3 | exon | 46108391 | 46108470 | − | gene_id “ASPS_NG11”; transcript_id |
| | | | | | “ASPS_NG11.8”; exon “2”; |
| chr3 | exon | 46116143 | 46116207 | − | gene_id “ASPS_NG11”; transcript_id |
| | | | | | “ASPS_NG11.8”; exon “3”; |
| chr3 | exon | 46118232 | 46118418 | − | gene_id “ASPS_NG11”; transcript_id |
| | | | | | “ASPS_NG11.8”; exon “4”; |
| chr3 | exon | 46127286 | 46127414 | − | gene_id “ASPS_NG11”; transcript_id |
| | | | | | “ASPS_NG11.8”; exon “5”; |
| chr3 | transcript | 46102539 | 46127414 | − | gene_id “ASPS_NG11”; transcript_id |
| | | | | | “ASPS_NG11.7”; RPKM “0.9001”; cov |
| | | | | | “11.9334”; |
| chr3 | exon | 46102539 | 46103187 | − | gene_id “ASPS_NG11”; transcript_id |
| | | | | | “ASPS_NG11.7”; exon “1”; |
| chr3 | exon | 46108391 | 46108470 | − | gene_id “ASPS_NG11”; transcript_id |
| | | | | | “ASPS_NG11.7”; exon “2”; |
| chr3 | exon | 46114955 | 46115053 | − | gene_id “ASPS_NG11”; transcript_id |
| | | | | | “ASPS_NG11.7”; exon “3”; |
| chr3 | exon | 46116143 | 46116207 | − | gene_id “ASPS_NG11”; transcript_id |
| | | | | | “ASPS_NG11.7”; exon “4”; |
| chr3 | exon | 46127286 | 46127414 | − | gene_id “ASPS_NG11”; transcript_id |
| | | | | | “ASPS_NG11.7”; exon “5”; |
| chr3 | transcript | 46102539 | 46127414 | − | gene_id “ASPS_NG11”; transcript_id |
| | | | | | “ASPS_NG11.6”; RPKM “2.5335”; cov |
| | | | | | “33.5906”; |
| chr3 | exon | 46102539 | 46103187 | − | gene_id “ASPS_NG11”; transcript_id |
| | | | | | “ASPS_NG11.6”; exon “1”; |
| chr3 | exon | 46108391 | 46108470 | − | gene_id “ASPS_NG11”; transcript_id |
| | | | | | “ASPS_NG11.6”; exon “2”; |
| chr3 | exon | 46114955 | 46115053 | − | gene_id “ASPS_NG11”; transcript_id |
| | | | | | “ASPS_NG11.6”; exon “3”; |
| chr3 | exon | 46127286 | 46127414 | − | gene_id “ASPS_NG11”; transcript_id |
| | | | | | “ASPS_NG11.6”; exon “4”; |
| chr3 | transcript | 46102539 | 46106555 | − | gene_id “ASPS_NG11”; transcript_id |
| | | | | | “ASPS_NG11.1”; RPKM “1.8421”; cov |
| | | | | | “24.4230”; |
| chr3 | exon | 46102539 | 46106555 | − | gene_id “ASPS_NG11”; transcript_id |
| | | | | | “ASPS_NG11.1”; exon “1”; |
| chr3 | transcript | 46102539 | 46127414 | − | gene_id “ASPS_NG11”; transcript_id |
| | | | | | “ASPS_NG11.5”; RPKM “25.0939”; cov |
| | | | | | “332.7060”; |
| chr3 | exon | 46102539 | 46103187 | − | gene_id “ASPS_NG11”; transcript_id |
| | | | | | “ASPS_NG11.5”; exon “1”; |
| chr3 | exon | 46108391 | 46108470 | − | gene_id “ASPS_NG11”; transcript_id |
| | | | | | “ASPS_NG11.5”; exon “2”; |
| chr3 | exon | 46127286 | 46127414 | − | gene_id “ASPS_NG11”; transcript_id |
| | | | | | “ASPS_NG11.5”; exon “3”; |
| chr3 | transcript | 46102539 | 46127414 | − | gene_id “ASPS_NG11”; transcript_id |
| | | | | | “ASPS_NG11.4”; RPKM “1.0967”; cov |
| | | | | | “14.5411”; |
| chr3 | exon | 46102539 | 46102906 | − | gene_id “ASPS_NG11”; transcript_id |
| | | | | | “ASPS_NG11.4”; exon “1”; |
| chr3 | exon | 46108391 | 46108470 | − | gene_id “ASPS_NG11”; transcript_id |
| | | | | | “ASPS_NG11.4”; exon “2”; |
| chr3 | exon | 46127286 | 46127414 | − | gene_id “ASPS_NG11”; transcript_id |
| | | | | | “ASPS_NG11.4”; exon “3”; |
| chr3 | transcript | 46102539 | 46127414 | − | gene_id “ASPS_NG11”; transcript_id |
| | | | | | “ASPS_NG11.2”; RPKM “1.9235”; cov |
| | | | | | “25.5028”; |
| chr3 | exon | 46102539 | 46103187 | − | gene_id “ASPS_NG11”; transcript_id |
| | | | | | “ASPS_NG11.2”; exon “1”; |
| chr3 | exon | 46127286 | 46127414 | − | gene_id “ASPS_NG11”; transcript_id |
| | | | | | “ASPS_NG11.2”; exon “2”; |
| chr4 | transcript | 65721483 | 65756904 | + | gene_id “ASPS_NG12”; transcript_id |
| | | | | | “ASPS_NG12.2”; RPKM “13.3595”; cov |
| | | | | | “177.1252”; |
| chr4 | exon | 65721483 | 65721563 | + | gene_id “ASPS_NG12”; transcript_id |
| | | | | | “ASPS_NG12.2”; exon “1”; |
| chr4 | exon | 65723424 | 65723576 | + | gene_id “ASPS_NG12”; transcript_id |
| | | | | | “ASPS_NG12.2”; exon “2”; |
| chr4 | exon | 65754191 | 65756904 | + | gene_id “ASPS_NG12”; transcript_id |
| | | | | | “ASPS_NG12.2”; exon “3”; |
| chr4 | transcript | 65721483 | 65756904 | + | gene_id “ASPS_NG12”; transcript_id |
| | | | | | “ASPS_NG12.3”; RPKM “3.5416”; cov |
| | | | | | “46.9560”; |
| chr4 | exon | 65721483 | 65721527 | + | gene_id “ASPS_NG12”; transcript_id |
| | | | | | “ASPS_NG12.3”; exon “1”; |
| chr4 | exon | 65723424 | 65723576 | + | gene_id “ASPS_NG12”; transcript_id |
| | | | | | “ASPS_NG12.3”; exon “2”; |
| chr4 | exon | 65754191 | 65756904 | + | gene_id “ASPS_NG12”; transcript_id |
| | | | | | “ASPS_NG12.3”; exon “3”; |
| chr4 | transcript | 65721483 | 65756904 | + | gene_id “ASPS_NG12”; transcript_id |
| | | | | | “ASPS_NG12.4”; RPKM “1.1409”; cov |
| | | | | | “15.1264”; |
| chr4 | exon | 65721483 | 65721563 | + | gene_id “ASPS_NG12”; transcript_id |
| | | | | | “ASPS_NG12.4”; exon “1”; |
| chr4 | exon | 65723424 | 65723777 | + | gene_id “ASPS_NG12”; transcript_id |
| | | | | | “ASPS_NG12.4”; exon “2”; |
| chr4 | exon | 65754191 | 65756904 | + | gene_id “ASPS_NG12”; transcript_id |
| | | | | | “ASPS_NG12.4”; exon “3”; |
| chr4 | transcript | 65721483 | 65724294 | + | gene_id “ASPS_NG12”; transcript_id |
| | | | | | “ASPS_NG12.5”; RPKM “1.5355”; cov |
| | | | | | “20.3582”; |
| chr4 | exon | 65721483 | 65721527 | + | gene_id “ASPS_NG12”; transcript_id |
| | | | | | “ASPS_NG12.5”; exon “1”; |
| chr4 | exon | 65723424 | 65724294 | + | gene_id “ASPS_NG12”; transcript_id |
| | | | | | “ASPS_NG12.5”; exon “2”; |
| chr4 | transcript | 65751008 | 65756904 | + | gene_id “ASPS_NG12”; transcript_id |
| | | | | | “ASPS_NG12.1”; RPKM “1.8233”; cov |
| | | | | | “24.1747”; |
| chr4 | exon | 65751008 | 65756904 | + | gene_id “ASPS_NG12”; transcript_id |
| | | | | | “ASPS_NG12.1”; exon “1”; |
| chr5 | transcript | 112949280 | 113334096 | + | gene_id “ASPS_NG13”; transcript_id |
| | | | | | “ASPS_NG13.16”; RPKM “2.7699”; cov |
| | | | | | “36.7245”; |
| chr5 | exon | 112949280 | 112949426 | + | gene_id “ASPS_NG13”; transcript_id |
| | | | | | “ASPS_NG13.16”; exon “1”; |
| chr5 | exon | 113026756 | 113026851 | + | gene_id “ASPS_NG13”; transcript_id |
| | | | | | “ASPS_NG13.16”; exon “2”; |
| chr5 | exon | 113333873 | 113334096 | + | gene_id “ASPS_NG13”; transcript_id |
| | | | | | “ASPS_NG13.16”; exon “3”; |
| chr5 | transcript | 112949280 | 113052437 | + | gene_id “ASPS_NG13”; transcript_id |
| | | | | | “ASPS_NG13.21”; RPKM “1.2884”; cov |
| | | | | | “17.0818”; |
| chr5 | exon | 112949280 | 112949426 | + | gene_id “ASPS_NG13”; transcript_id |
| | | | | | “ASPS_NG13.21”; exon “1”; |
| chr5 | exon | 112969011 | 112969061 | + | gene_id “ASPS_NG13”; transcript_id |
| | | | | | “ASPS_NG13.21”; exon “2”; |
| chr5 | exon | 113026756 | 113026851 | + | gene_id “ASPS_NG13”; transcript_id |
| | | | | | “ASPS_NG13.21”; exon “3”; |
| chr5 | exon | 113030776 | 113031030 | + | gene_id “ASPS_NG13”; transcript_id |
| | | | | | “ASPS_NG13.21”; exon “4”; |
| chr5 | exon | 113048088 | 113052437 | + | gene_id “ASPS_NG13”; transcript_id |
| | | | | | “ASPS_NG13.21”; exon “5”; |
| chr5 | transcript | 112949280 | 113052437 | + | gene_id “ASPS_NG13”; transcript_id |
| | | | | | “ASPS_NG13.20”; RPKM “1.6945”; cov |
| | | | | | “22.4666”; |
| chr5 | exon | 112949280 | 112949426 | + | gene_id “ASPS_NG13”; transcript_id |
| | | | | | “ASPS_NG13.20”; exon “1”; |
| chr5 | exon | 112988136 | 112988282 | + | gene_id “ASPS_NG13”; transcript_id |
| | | | | | “ASPS_NG13.20”; exon “2”; |
| chr5 | exon | 112989134 | 112989299 | + | gene_id “ASPS_NG13”; transcript_id |
| | | | | | “ASPS_NG13.20”; exon “3”; |
| chr5 | exon | 113026756 | 113026851 | + | gene_id “ASPS_NG13”; transcript_id |
| | | | | | “ASPS_NG13.20”; exon “4”; |
| chr5 | exon | 113030776 | 113031030 | + | gene_id “ASPS_NG13”; transcript_id |
| | | | | | “ASPS_NG13.20”; exon “5”; |
| chr5 | exon | 113048088 | 113048242 | + | gene_id “ASPS_NG13”; transcript_id |
| | | | | | “ASPS_NG13.20”; exon “6”; |
| chr5 | exon | 113050251 | 113050354 | + | gene_id “ASPS_NG13”; transcript_id |
| | | | | | “ASPS_NG13.20”; exon “7”; |
| chr5 | exon | 113051700 | 113052437 | + | gene_id “ASPS_NG13”; transcript_id |
| | | | | | “ASPS_NG13.20”; exon “8”; |
| chr5 | transcript | 112949280 | 113259872 | + | gene_id “ASPS_NG13”; transcript_id |
| | | | | | “ASPS_NG13.5”; RPKM “1.9936”; cov |
| | | | | | “26.4316”; |
| chr5 | exon | 112949280 | 112949426 | + | gene_id “ASPS_NG13”; transcript_id |
| | | | | | “ASPS_NG13.5”; exon “1”; |
| chr5 | exon | 113026756 | 113026851 | + | gene_id “ASPS_NG13”; transcript_id |
| | | | | | “ASPS_NG13.5”; exon “2”; |
| chr5 | exon | 113069258 | 113069343 | + | gene_id “ASPS_NG13”; transcript_id |
| | | | | | “ASPS_NG13.5”; exon “3”; |
| chr5 | exon | 113257231 | 113259872 | + | gene_id “ASPS_NG13”; transcript_id |
| | | | | | “ASPS_NG13.5”; exon “4”; |
| chr5 | transcript | 112949280 | 112967699 | + | gene_id “ASPS_NG13”; transcript_id |
| | | | | | “ASPS_NG13.4”; RPKM “1.6734”; cov |
| | | | | | “22.1861”; |
| chr5 | exon | 112949280 | 112949426 | + | gene_id “ASPS_NG13”; transcript_id |
| | | | | | “ASPS_NG13.4”; exon “1”; |
| chr5 | exon | 112966660 | 112967699 | + | gene_id “ASPS_NG13”; transcript_id |
| | | | | | “ASPS_NG13.4”; exon “2”; |
| chr5 | transcript | 112949280 | 113052437 | + | gene_id “ASPS_NG13”; transcript_id |
| | | | | | “ASPS_NG13.3”; RPKM “0.8982”; cov |
| | | | | | “11.9091”; |
| chr5 | exon | 112949280 | 112949426 | + | gene_id “ASPS_NG13”; transcript_id |
| | | | | | “ASPS_NG13.3”; exon “1”; |
| chr5 | exon | 113026756 | 113026851 | + | gene_id “ASPS_NG13”; transcript_id |
| | | | | | “ASPS_NG13.3”; exon “2”; |
| chr5 | exon | 113050251 | 113050354 | + | gene_id “ASPS_NG13”; transcript_id |
| | | | | | “ASPS_NG13.3”; exon “3”; |
| chr5 | exon | 113051707 | 113052437 | + | gene_id “ASPS_NG13”; transcript_id |
| | | | | | “ASPS_NG13.3”; exon “4”; |
| chr5 | transcript | 112949280 | 113659840 | + | gene_id “ASPS_NG13”; transcript_id |
| | | | | | “ASPS_NG13.18”; RPKM “2.3720”; cov |
| | | | | | “31.4491”; |
| chr5 | exon | 112949280 | 112949426 | + | gene_id “ASPS_NG13”; transcript_id |
| | | | | | “ASPS_NG13.18”; exon “1”; |
| chr5 | exon | 112966660 | 112966985 | + | gene_id “ASPS_NG13”; transcript_id |
| | | | | | “ASPS_NG13.18”; exon “2”; |
| chr5 | exon | 112969011 | 112969061 | + | gene_id “ASPS_NG13”; transcript_id |
| | | | | | “ASPS_NG13.18”; exon “3”; |
| chr5 | exon | 113026756 | 113026851 | + | gene_id “ASPS_NG13”; transcript_id |
| | | | | | “ASPS_NG13.18”; exon “4”; |
| chr5 | exon | 113069258 | 113069343 | + | gene_id “ASPS_NG13”; transcript_id |
| | | | | | “ASPS_NG13.18”; exon “5”; |
| chr5 | exon | 113333873 | 113334059 | + | gene_id “ASPS_NG13”; transcript_id |
| | | | | | “ASPS_NG13.18”; exon “6”; |
| chr5 | exon | 113557177 | 113557262 | + | gene_id “ASPS_NG13”; transcript_id |
| | | | | | “ASPS_NG13.18”; exon “7”; |
| chr5 | exon | 113659398 | 113659840 | + | gene_id “ASPS_NG13”; transcript_id |
| | | | | | “ASPS_NG13.18”; exon “8”; |
| chr5 | transcript | 112949280 | 113334096 | + | gene_id “ASPS_NG13”; transcript_id |
| | | | | | “ASPS_NG13.14”; RPKM “5.9752”; cov |
| | | | | | “79.2222”; |
| chr5 | exon | 112949280 | 112949426 | + | gene_id “ASPS_NG13”; transcript_id |
| | | | | | “ASPS_NG13.14”; exon “1”; |
| chr5 | exon | 112969011 | 112969061 | + | gene_id “ASPS_NG13”; transcript_id |
| | | | | | “ASPS_NG13.14”; exon “2”; |
| chr5 | exon | 113026756 | 113026851 | + | gene_id “ASPS_NG13”; transcript_id |
| | | | | | “ASPS_NG13.14”; exon “3”; |
| chr5 | exon | 113333873 | 113334096 | + | gene_id “ASPS_NG13”; transcript_id |
| | | | | | “ASPS_NG13.14”; exon “4”; |
| chr5 | transcript | 112949280 | 113031854 | + | gene_id “ASPS_NG13”; transcript_id |
| | | | | | “ASPS_NG13.15”; RPKM “5.7787”; cov |
| | | | | | “76.6166”; |
| chr5 | exon | 112949280 | 112949426 | + | gene_id “ASPS_NG13”; transcript_id |
| | | | | | “ASPS_NG13.15”; exon “1”; |
| chr5 | exon | 112969011 | 112969061 | + | gene_id “ASPS_NG13”; transcript_id |
| | | | | | “ASPS_NG13.15”; exon “2”; |
| chr5 | exon | 113026756 | 113026851 | + | gene_id “ASPS_NG13”; transcript_id |
| | | | | | “ASPS_NG13.15”; exon “3”; |
| chr5 | exon | 113030776 | 113031854 | + | gene_id “ASPS_NG13”; transcript_id |
| | | | | | “ASPS_NG13.15”; exon “4”; |
| chr5 | transcript | 112949280 | 113052437 | + | gene_id “ASPS_NG13”; transcript_id |
| | | | | | “ASPS_NG13.13”; RPKM “7.3834”; cov |
| | | | | | “97.8922”; |
| chr5 | exon | 112949280 | 112949426 | + | gene_id “ASPS_NG13”; transcript_id |
| | | | | | “ASPS_NG13.13”; exon “1”; |
| chr5 | exon | 112969011 | 112969061 | + | gene_id “ASPS_NG13”; transcript_id |
| | | | | | “ASPS_NG13.13”; exon “2”; |
| chr5 | exon | 112988136 | 112988282 | + | gene_id “ASPS_NG13”; transcript_id |
| | | | | | “ASPS_NG13.13”; exon “3”; |
| chr5 | exon | 112989134 | 112989299 | + | gene_id “ASPS_NG13”; transcript_id |
| | | | | | “ASPS_NG13.13”; exon “4”; |
| chr5 | exon | 113026756 | 113026851 | + | gene_id “ASPS_NG13”; transcript_id |
| | | | | | “ASPS_NG13.13”; exon “5”; |
| chr5 | exon | 113030776 | 113031030 | + | gene_id “ASPS_NG13”; transcript_id |
| | | | | | “ASPS_NG13.13”; exon “6”; |
| chr5 | exon | 113048088 | 113048242 | + | gene_id “ASPS_NG13”; transcript_id |
| | | | | | “ASPS_NG13.13”; exon “7”; |
| chr5 | exon | 113050251 | 113050354 | + | gene_id “ASPS_NG13”; transcript_id |
| | | | | | “ASPS_NG13.13”; exon “8”; |
| chr5 | exon | 113051707 | 113052437 | + | gene_id “ASPS_NG13”; transcript_id |
| | | | | | “ASPS_NG13.13”; exon “9”; |
| chr5 | transcript | 112949280 | 113052437 | + | gene_id “ASPS_NG13”; transcript_id |
| | | | | | “ASPS_NG13.11”; RPKM “9.3305”; cov |
| | | | | | “123.7077”; |
| chr5 | exon | 112949280 | 112949426 | + | gene_id “ASPS_NG13”; transcript_id |
| | | | | | “ASPS_NG13.11”; exon “1”; |
| chr5 | exon | 112966660 | 112966985 | + | gene_id “ASPS_NG13”; transcript_id |
| | | | | | “ASPS_NG13.11”; exon “2”; |
| chr5 | exon | 112969011 | 112969061 | + | gene_id “ASPS_NG13”; transcript_id |
| | | | | | “ASPS_NG13.11”; exon “3”; |
| chr5 | exon | 113026756 | 113026851 | + | gene_id “ASPS_NG13”; transcript_id |
| | | | | | “ASPS_NG13.11”; exon “4”; |
| chr5 | exon | 113030776 | 113031030 | + | gene_id “ASPS_NG13”; transcript_id |
| | | | | | “ASPS_NG13.11”; exon “5”; |
| chr5 | exon | 113048088 | 113052437 | + | gene_id “ASPS_NG13”; transcript_id |
| | | | | | “ASPS_NG13.11”; exon “6”; |
| chr5 | transcript | 112949280 | 112990349 | + | gene_id “ASPS_NG13”; transcript_id |
| | | | | | “ASPS_NG13.10”; RPKM “1.2471”; cov |
| | | | | | “16.5342”; |
| chr5 | exon | 112949280 | 112949426 | + | gene_id “ASPS_NG13”; transcript_id |
| | | | | | “ASPS_NG13.10”; exon “1”; |
| chr5 | exon | 112966660 | 112966985 | + | gene_id “ASPS_NG13”; transcript_id |
| | | | | | “ASPS_NG13.10”; exon “2”; |
| chr5 | exon | 112969011 | 112969061 | + | gene_id “ASPS_NG13”; transcript_id |
| | | | | | “ASPS_NG13.10”; exon “3”; |
| chr5 | exon | 112988136 | 112988282 | + | gene_id “ASPS_NG13”; transcript_id |
| | | | | | “ASPS_NG13.10”; exon “4”; |
| chr5 | exon | 112989134 | 112990349 | + | gene_id “ASPS_NG13”; transcript_id |
| | | | | | “ASPS_NG13.10”; exon “5”; |
| chr5 | transcript | 112949280 | 113259872 | + | gene_id “ASPS_NG13”; transcript_id |
| | | | | | “ASPS_NG13.8”; RPKM “3.1123”; cov |
| | | | | | “41.2645”; |
| chr5 | exon | 112949280 | 112949426 | + | gene_id “ASPS_NG13”; transcript_id |
| | | | | | “ASPS_NG13.8”; exon “1”; |
| chr5 | exon | 112969011 | 112969061 | + | gene_id “ASPS_NG13”; transcript_id |
| | | | | | “ASPS_NG13.8”; exon “2”; |
| chr5 | exon | 113026756 | 113026851 | + | gene_id “ASPS_NG13”; transcript_id |
| | | | | | “ASPS_NG13.8”; exon “3”; |
| chr5 | exon | 113069258 | 113069343 | + | gene_id “ASPS_NG13”; transcript_id |
| | | | | | “ASPS_NG13.8”; exon “4”; |
| chr5 | exon | 113257231 | 113259872 | + | gene_id “ASPS_NG13”; transcript_id |
| | | | | | “ASPS_NG13.8”; exon “5”; |
| chr5 | transcript | 112949280 | 113052437 | + | gene_id “ASPS_NG13”; transcript_id |
| | | | | | “ASPS_NG13.7”; RPKM “8.9994”; cov |
| | | | | | “119.3183”; |
| chr5 | exon | 112949280 | 112949426 | + | gene_id “ASPS_NG13”; transcript_id |
| | | | | | “ASPS_NG13.7”; exon “1”; |
| chr5 | exon | 112969011 | 112969061 | + | gene_id “ASPS_NG13”; transcript_id |
| | | | | | “ASPS_NG13.7”; exon “2”; |
| chr5 | exon | 113026756 | 113026851 | + | gene_id “ASPS_NG13”; transcript_id |
| | | | | | “ASPS_NG13.7”; exon “3”; |
| chr5 | exon | 113048088 | 113048242 | + | gene_id “ASPS_NG13”; transcript_id |
| | | | | | “ASPS_NG13.7”; exon “4”; |
| chr5 | exon | 113050251 | 113052437 | + | gene_id “ASPS_NG13”; transcript_id |
| | | | | | “ASPS_NG13.7”; exon “5”; |
| chr5 | transcript | 112949280 | 113052437 | + | gene_id “ASPS_NG13”; transcript_id |
| | | | | | “ASPS_NG13.6”; RPKM “18.2483”; cov |
| | | | | | “241.9431”; |
| chr5 | exon | 112949280 | 112949426 | + | gene_id “ASPS_NG13”; transcript_id |
| | | | | | “ASPS_NG13.6”; exon “1”; |
| chr5 | exon | 113026756 | 113026851 | + | gene_id “ASPS_NG13”; transcript_id |
| | | | | | “ASPS_NG13.6”; exon “2”; |
| chr5 | exon | 113048088 | 113048242 | + | gene_id “ASPS_NG13”; transcript_id |
| | | | | | “ASPS_NG13.6”; exon “3”; |
| chr5 | exon | 113050251 | 113052437 | + | gene_id “ASPS_NG13”; transcript_id |
| | | | | | “ASPS_NG13.6”; exon “4”; |
| chr5 | transcript | 112949280 | 113052437 | + | gene_id “ASPS_NG13”; transcript_id |
| | | | | | “ASPS_NG13.12”; RPKM “8.5899”; cov |
| | | | | | “113.8881”; |
| chr5 | exon | 112949280 | 112949426 | + | gene_id “ASPS_NG13”; transcript_id |
| | | | | | “ASPS_NG13.12”; exon “1”; |
| chr5 | exon | 113026756 | 113026851 | + | gene_id “ASPS_NG13”; transcript_id |
| | | | | | “ASPS_NG13.12”; exon “2”; |
| chr5 | exon | 113030776 | 113031030 | + | gene_id “ASPS_NG13”; transcript_id |
| | | | | | “ASPS_NG13.12”; exon “3”; |
| chr5 | exon | 113048088 | 113048242 | + | gene_id “ASPS_NG13”; transcript_id |
| | | | | | “ASPS_NG13.12”; exon “4”; |
| chr5 | exon | 113050251 | 113050354 | + | gene_id “ASPS_NG13”; transcript_id |
| | | | | | “ASPS_NG13.12”; exon “5”; |
| chr5 | exon | 113051707 | 113052437 | + | gene_id “ASPS_NG13”; transcript_id |
| | | | | | “ASPS_NG13.12”; exon “6”; |
| chr5 | transcript | 112949280 | 112993964 | + | gene_id “ASPS_NG13”; transcript_id |
| | | | | | “ASPS_NG13.9”; RPKM “6.8310”; cov |
| | | | | | “90.5684”; |
| chr5 | exon | 112949280 | 112949426 | + | gene_id “ASPS_NG13”; transcript_id |
| | | | | | “ASPS_NG13.9”; exon “1”; |
| chr5 | exon | 112966660 | 112966985 | + | gene_id “ASPS_NG13”; transcript_id |
| | | | | | “ASPS_NG13.9”; exon “2”; |
| chr5 | exon | 112969011 | 112969061 | + | gene_id “ASPS_NG13”; transcript_id |
| | | | | | “ASPS_NG13.9”; exon “3”; |
| chr5 | exon | 112988136 | 112988282 | + | gene_id “ASPS_NG13”; transcript_id |
| | | | | | “ASPS_NG13.9”; exon “4”; |
| chr5 | exon | 112989134 | 112989299 | + | gene_id “ASPS_NG13”; transcript_id |
| | | | | | “ASPS_NG13.9”; exon “5”; |
| chr5 | exon | 112992477 | 112993964 | + | gene_id “ASPS_NG13”; transcript_id |
| | | | | | “ASPS_NG13.9”; exon “6”; |
| chr5 | transcript | 112949280 | 113129757 | + | gene_id “ASPS_NG13”; transcript_id |
| | | | | | “ASPS_NG13.19”; RPKM “2.2739”; cov |
| | | | | | “30.1487”; |
| chr5 | exon | 112949280 | 112949426 | + | gene_id “ASPS_NG13”; transcript_id |
| | | | | | “ASPS_NG13.19”; exon “1”; |
| chr5 | exon | 112969011 | 112969061 | + | gene_id “ASPS_NG13”; transcript_id |
| | | | | | “ASPS_NG13.19”; exon “2”; |
| chr5 | exon | 113026756 | 113026851 | + | gene_id “ASPS_NG13”; transcript_id |
| | | | | | “ASPS_NG13.19”; exon “3”; |
| chr5 | exon | 113069258 | 113069343 | + | gene_id “ASPS_NG13”; transcript_id |
| | | | | | “ASPS_NG13.19”; exon “4”; |
| chr5 | exon | 113086902 | 113086943 | + | gene_id “ASPS_NG13”; transcript_id |
| | | | | | “ASPS_NG13.19”; exon “5”; |
| chr5 | exon | 113098038 | 113098138 | + | gene_id “ASPS_NG13”; transcript_id |
| | | | | | “ASPS_NG13.19”; exon “6”; |
| chr5 | exon | 113127131 | 113129757 | + | gene_id “ASPS_NG13”; transcript_id |
| | | | | | “ASPS_NG13.19”; exon “7”; |
| chr5 | transcript | 113008180 | 113011670 | + | gene_id “ASPS_NG13”; transcript_id |
| | | | | | “ASPS_NG13.2”; RPKM “3.9156”; cov |
| | | | | | “51.9142”; |
| chr5 | exon | 113008180 | 113011670 | + | gene_id “ASPS_NG13”; transcript_id |
| | | | | | “ASPS_NG13.2”; exon “1”; |
| chr5 | transcript | 113071583 | 113334096 | + | gene_id “ASPS_NG13”; transcript_id |
| | | | | | “ASPS_NG13.17”; RPKM “2.4834”; cov |
| | | | | | “32.9261”; |
| chr5 | exon | 113071583 | 113072029 | + | gene_id “ASPS_NG13”; transcript_id |
| | | | | | “ASPS_NG13.17”; exon “1”; |
| chr5 | exon | 113333873 | 113334096 | + | gene_id “ASPS_NG13”; transcript_id |
| | | | | | “ASPS_NG13.17”; exon “2”; |
| chr5 | transcript | 113086065 | 113157528 | + | gene_id “ASPS_NG13”; transcript_id |
| | | | | | “ASPS_NG13.22”; RPKM “0.9950”; cov |
| | | | | | “13.1927”; |
| chr5 | exon | 113086065 | 113086943 | + | gene_id “ASPS_NG13”; transcript_id |
| | | | | | “ASPS_NG13.22”; exon “1”; |
| chr5 | exon | 113098038 | 113098138 | + | gene_id “ASPS_NG13”; transcript_id |
| | | | | | “ASPS_NG13.22”; exon “2”; |
| chr5 | exon | 113154692 | 113157528 | + | gene_id “ASPS_NG13”; transcript_id |
| | | | | | “ASPS_NG13.22”; exon “3”; |
| chr5 | transcript | 113121979 | 113129757 | + | gene_id “ASPS_NG13”; transcript_id |
| | | | | | “ASPS_NG13.1”; RPKM “6.8772”; cov |
| | | | | | “91.1809”; |
| chr5 | exon | 113121979 | 113129757 | + | gene_id “ASPS_NG13”; transcript_id |
| | | | | | “ASPS_NG13.1”; exon “1”; |
| chr5 | transcript | 113000528 | 113006158 | + | gene_id “ASPS_NG15”; transcript_id |
| | | | | | “ASPS_NG15.1”; RPKM “13.6474”; cov |
| | | | | | “180.9435”; |
| chr5 | exon | 113000528 | 113006158 | + | gene_id “ASPS_NG15”; transcript_id |
| | | | | | “ASPS_NG15.1”; exon “1”; |
| chr5 | transcript | 113212587 | 113216859 | + | gene_id “ASPS_NG14”; transcript_id |
| | | | | | “ASPS_NG14.1”; RPKM “9.6733”; cov |
| | | | | | “128.2527”; |
| chr5 | exon | 113212587 | 113216859 | + | gene_id “ASPS_NG14”; transcript_id |
| | | | | | “ASPS_NG14.1”; exon “1”; |
| chr6 | transcript | 37741718 | 37745323 | − | gene_id “ASPS_NG16”; transcript_id |
| | | | | | “ASPS_NG16.1”; RPKM “1.7981”; cov |
| | | | | | “23.8405”; |
| chr6 | exon | 37741718 | 37742323 | − | gene_id “ASPS_NG16”; transcript_id |
| | | | | | “ASPS_NG16.1”; exon “1”; |
| chr6 | exon | 37744229 | 37744428 | − | gene_id “ASPS_NG16”; transcript_id |
| | | | | | “ASPS_NG16.1”; exon “2”; |
| chr6 | exon | 37745112 | 37745323 | − | gene_id “ASPS_NG16”; transcript_id |
| | | | | | “ASPS_NG16.1”; exon “3”; |
| chr6 | transcript | 37741718 | 37745323 | − | gene_id “ASPS_NG16”; transcript_id |
| | | | | | “ASPS_NG16.2”; RPKM “1.5995”; cov |
| | | | | | “21.2068”; |
| chr6 | exon | 37741718 | 37742323 | − | gene_id “ASPS_NG16”; transcript_id |
| | | | | | “ASPS_NG16.2”; exon “1”; |
| chr6 | exon | 37744229 | 37745323 | − | gene_id “ASPS_NG16”; transcript_id |
| | | | | | “ASPS_NG16.2”; exon “2”; |
| chr6 | transcript | 150621167 | 150627265 | + | gene_id “ASPS_NG17”; transcript_id |
| | | | | | “ASPS_NG17.1”; RPKM “7.9164”; cov |
| | | | | | “104.9589”; |
| chr6 | exon | 150621167 | 150621622 | + | gene_id “ASPS_NG17”; transcript_id |
| | | | | | “ASPS_NG17.1”; exon “1”; |
| chr6 | exon | 150626922 | 150627265 | + | gene_id “ASPS_NG17”; transcript_id |
| | | | | | “ASPS_NG17.1”; exon “2”; |
| chr8 | transcript | 118776780 | 118782163 | + | gene_id “ASPS_NG18”; transcript_id |
| | | | | | “ASPS_NG18.1”; RPKM “8.2527”; cov |
| | | | | | “109.4172”; |
| chr8 | exon | 118776780 | 118776876 | + | gene_id “ASPS_NG18”; transcript_id |
| | | | | | “ASPS_NG18.1”; exon “1”; |
| chr8 | exon | 118779033 | 118779103 | + | gene_id “ASPS_NG18”; transcript_id |
| | | | | | “ASPS_NG18.1”; exon “2”; |
| chr8 | exon | 118781925 | 118782163 | + | gene_id “ASPS_NG18”; transcript_id |
| | | | | | “ASPS_NG18.1”; exon “3”; |
| chr8 | transcript | 118776780 | 118782163 | + | gene_id “ASPS_NG18”; transcript_id |
| | | | | | “ASPS_NG18.2”; RPKM “3.9654”; cov |
| | | | | | “52.5752”; |
| chr8 | exon | 118776780 | 118776876 | + | gene_id “ASPS_NG18”; transcript_id |
| | | | | | “ASPS_NG18.2”; exon “1”; |
| chr8 | exon | 118779033 | 118779103 | + | gene_id “ASPS_NG18”; transcript_id |
| | | | | | “ASPS_NG18.2”; exon “2”; |
| chr8 | exon | 118781606 | 118782163 | + | gene_id “ASPS_NG18”; transcript_id |
| | | | | | “ASPS_NG18.2”; exon “3”; |
| chr8 | transcript | 118776780 | 118782163 | + | gene_id “ASPS_NG18”; transcript_id |
| | | | | | “ASPS_NG18.3”; RPKM “1.4728”; cov |
| | | | | | “19.5269”; |
| chr8 | exon | 118776780 | 118776876 | + | gene_id “ASPS_NG18”; transcript_id |
| | | | | | “ASPS_NG18.3”; exon “1”; |
| chr8 | exon | 118779033 | 118779103 | + | gene_id “ASPS_NG18”; transcript_id |
| | | | | | “ASPS_NG18.3”; exon “2”; |
| chr8 | exon | 118779974 | 118782163 | + | gene_id “ASPS_NG18”; transcript_id |
| | | | | | “ASPS_NG18.3”; exon “3”; |
| chr8 | transcript | 132845202 | 132864921 | − | gene_id “ASPS_NG19”; transcript_id |
| | | | | | “ASPS_NG19.2”; RPKM “2.7817”; cov |
| | | | | | “36.8812”; |
| chr8 | exon | 132845202 | 132854933 | − | gene_id “ASPS_NG19”; transcript_id |
| | | | | | “ASPS_NG19.2”; exon “1”; |
| chr8 | exon | 132855839 | 132855940 | − | gene_id “ASPS_NG19”; transcript_id |
| | | | | | “ASPS_NG19.2”; exon “2”; |
| chr8 | exon | 132864681 | 132864921 | − | gene_id “ASPS_NG19”; transcript_id |
| | | | | | “ASPS_NG19.2”; exon “3”; |
| chr8 | transcript | 132863046 | 132864921 | − | gene_id “ASPS_NG19”; transcript_id |
| | | | | | “ASPS_NG19.1”; RPKM “18.5467”; cov |
| | | | | | “245.8995”; |
| chr8 | exon | 132863046 | 132864921 | − | gene_id “ASPS_NG19”; transcript_id |
| | | | | | “ASPS_NG19.1”; exon “1”; |
| chr8 | transcript | 134939202 | 134948254 | + | gene_id “ASPS_NG20”; transcript_id |
| | | | | | “ASPS_NG20.3”; RPKM “1.2962”; cov |
| | | | | | “17.1850”; |
| chr8 | exon | 134939202 | 134939301 | + | gene_id “ASPS_NG20”; transcript_id |
| | | | | | “ASPS_NG20.3”; exon “1”; |
| chr8 | exon | 134940629 | 134940683 | + | gene_id “ASPS_NG20”; transcript_id |
| | | | | | “ASPS_NG20.3”; exon “2”; |
| chr8 | exon | 134945156 | 134948254 | + | gene_id “ASPS_NG20”; transcript_id |
| | | | | | “ASPS_NG20.3”; exon “3”; |
| chr8 | transcript | 134939202 | 134948254 | + | gene_id “ASPS_NG20”; transcript_id |
| | | | | | “ASPS_NG20.2”; RPKM “1.3587”; cov |
| | | | | | “18.0147”; |
| chr8 | exon | 134939202 | 134939301 | + | gene_id “ASPS_NG20”; transcript_id |
| | | | | | “ASPS_NG20.2”; exon “1”; |
| chr8 | exon | 134940629 | 134940683 | + | gene_id “ASPS_NG20”; transcript_id |
| | | | | | “ASPS_NG20.2”; exon “2”; |
| chr8 | exon | 134945156 | 134945173 | + | gene_id “ASPS_NG20”; transcript_id |
| | | | | | “ASPS_NG20.2”; exon “3”; |
| chr8 | exon | 134946835 | 134948254 | + | gene_id “ASPS_NG20”; transcript_id |
| | | | | | “ASPS_NG20.2”; exon “4”; |
| chr8 | transcript | 134939202 | 134948254 | + | gene_id “ASPS_NG20”; transcript_id |
| | | | | | “ASPS_NG20.1”; RPKM “1.0919”; cov |
| | | | | | “14.4768”; |
| chr8 | exon | 134939202 | 134939301 | + | gene_id “ASPS_NG20”; transcript_id |
| | | | | | “ASPS_NG20.1”; exon “1”; |
| chr8 | exon | 134940629 | 134940683 | + | gene_id “ASPS_NG20”; transcript_id |
| | | | | | “ASPS_NG20.1”; exon “2”; |
| chr8 | exon | 134946835 | 134948254 | + | gene_id “ASPS_NG20”; transcript_id |
| | | | | | “ASPS_NG20.1”; exon “3”; |
| chr8 | transcript | 134939202 | 134976707 | + | gene_id “ASPS_NG20”; transcript_id |
| | | | | | “ASPS_NG20.4”; RPKM “10.5807”; cov |
| | | | | | “140.2833”; |
| chr8 | exon | 134939202 | 134939301 | + | gene_id “ASPS_NG20”; transcript_id |
| | | | | | “ASPS_NG20.4”; exon “1”; |
| chr8 | exon | 134940629 | 134940683 | + | gene_id “ASPS_NG20”; transcript_id |
| | | | | | “ASPS_NG20.4”; exon “2”; |
| chr8 | exon | 134966933 | 134976707 | + | gene_id “ASPS_NG20”; transcript_id |
| | | | | | “ASPS_NG20.4”; exon “3”; |
| chr8 | transcript | 134939202 | 134976707 | + | gene_id “ASPS_NG20”; transcript_id |
| | | | | | “ASPS_NG20.5”; RPKM “5.2540”; cov |
| | | | | | “69.6596”; |
| chr8 | exon | 134939202 | 134939301 | + | gene_id “ASPS_NG20”; transcript_id |
| | | | | | “ASPS_NG20.5”; exon “1”; |
| chr8 | exon | 134940629 | 134940683 | + | gene_id “ASPS_NG20”; transcript_id |
| | | | | | “ASPS_NG20.5”; exon “2”; |
| chr8 | exon | 134975792 | 134976707 | + | gene_id “ASPS_NG20”; transcript_id |
| | | | | | “ASPS_NG20.5”; exon “3”; |
| chr8 | transcript | 134939202 | 134976707 | + | gene_id “ASPS_NG20”; transcript_id |
| | | | | | “ASPS_NG20.8”; RPKM “1.3655”; cov |
| | | | | | “18.1038”; |
| chr8 | exon | 134939202 | 134939301 | + | gene_id “ASPS_NG20”; transcript_id |
| | | | | | “ASPS_NG20.8”; exon “1”; |
| chr8 | exon | 134940629 | 134940683 | + | gene_id “ASPS_NG20”; transcript_id |
| | | | | | “ASPS_NG20.8”; exon “2”; |
| chr8 | exon | 134950565 | 134950673 | + | gene_id “ASPS_NG20”; transcript_id |
| | | | | | “ASPS_NG20.8”; exon “3”; |
| chr8 | exon | 134975792 | 134976707 | + | gene_id “ASPS_NG20”; transcript_id |
| | | | | | “ASPS_NG20.8”; exon “4”; |
| chr8 | transcript | 134939202 | 134976707 | + | gene_id “ASPS_NG20”; transcript_id |
| | | | | | “ASPS_NG20.7”; RPKM “5.0122”; cov |
| | | | | | “66.4538”; |
| chr8 | exon | 134939202 | 134939301 | + | gene_id “ASPS_NG20”; transcript_id |
| | | | | | “ASPS_NG20.7”; exon “1”; |
| chr8 | exon | 134940629 | 134940683 | + | gene_id “ASPS_NG20”; transcript_id |
| | | | | | “ASPS_NG20.7”; exon “2”; |
| chr8 | exon | 134950565 | 134950673 | + | gene_id “ASPS_NG20”; transcript_id |
| | | | | | “ASPS_NG20.7”; exon “3”; |
| chr8 | exon | 134966933 | 134976707 | + | gene_id “ASPS_NG20”; transcript_id |
| | | | | | “ASPS_NG20.7”; exon “4”; |
| chr8 | transcript | 134939202 | 135017839 | + | gene_id “ASPS_NG20”; transcript_id |
| | | | | | “ASPS_NG20.6”; RPKM “1.4324”; cov |
| | | | | | “18.9917”; |
| chr8 | exon | 134939202 | 134939301 | + | gene_id “ASPS_NG20”; transcript_id |
| | | | | | “ASPS_NG20.6”; exon “1”; |
| chr8 | exon | 134940629 | 134940683 | + | gene_id “ASPS_NG20”; transcript_id |
| | | | | | “ASPS_NG20.6”; exon “2”; |
| chr8 | exon | 134975792 | 134975934 | + | gene_id “ASPS_NG20”; transcript_id |
| | | | | | “ASPS_NG20.6”; exon “3”; |
| chr8 | exon | 135014343 | 135017839 | + | gene_id “ASPS_NG20”; transcript_id |
| | | | | | “ASPS_NG20.6”; exon “4”; |
| chr9 | transcript | 102121560 | 102134490 | + | gene_id “ASPS_NG21”; transcript_id |
| | | | | | “ASPS_NG21.2”; RPKM “0.9077”; cov |
| | | | | | “12.0343”; |
| chr9 | exon | 102121560 | 102121919 | + | gene_id “ASPS_NG21”; transcript_id |
| | | | | | “ASPS_NG21.2”; exon “1”; |
| chr9 | exon | 102123653 | 102123782 | + | gene_id “ASPS_NG21”; transcript_id |
| | | | | | “ASPS_NG21.2”; exon “2”; |
| chr9 | exon | 102133335 | 102134490 | + | gene_id “ASPS_NG21”; transcript_id |
| | | | | | “ASPS_NG21.2”; exon “3”; |
| chr9 | transcript | 102130287 | 102134490 | + | gene_id “ASPS_NG21”; transcript_id |
| | | | | | “ASPS_NG21.1”; RPKM “6.2035”; cov |
| | | | | | “82.2483”; |
| chr9 | exon | 102130287 | 102134490 | + | gene_id “ASPS_NG21”; transcript_id |
| | | | | | “ASPS_NG21.1”; exon “1”; |
| chr9 | transcript | 102125575 | 102130251 | + | gene_id “ASPS_NG22”; transcript_id |
| | | | | | “ASPS_NG22.1”; RPKM “2.3838”; cov |
| | | | | | “31.6060”; |
| chr9 | exon | 102125575 | 102130251 | + | gene_id “ASPS_NG22”; transcript_id |
| | | | | | “ASPS_NG22.1”; exon “1”; |
| chr4 | transcript | 117434454 | 117435921 | + | gene_id “emCS_NG1”; transcript_id |
| | | | | | “emCS_NG1.1”; RPKM “8.2663”; cov |
| | | | | | “20.7905”; |
| chr4 | exon | 117434454 | 117434782 | + | gene_id “emCS_NG1”; transcript_id |
| | | | | | “emCS_NG1.1”; exon “1”; |
| chr4 | exon | 117435427 | 117435921 | + | gene_id “emCS_NG1”; transcript_id |
| | | | | | “emCS_NG1.1”; exon “2”; |
| chr5 | transcript | 102073836 | 102079406 | − | gene_id “emCS_NG2”; transcript_id |
| | | | | | “emCS_NG2.1”; RPKM “10.4680”; cov |
| | | | | | “26.3281”; |
| chr5 | exon | 102073836 | 102079406 | − | gene_id “emCS_NG2”; transcript_id |
| | | | | | “emCS_NG2.1”; exon “1”; |
| chr10 | transcript | 2717538 | 2723495 | − | gene_id “LGFS_NG20”; transcript_id |
| | | | | | “LGFS_NG20.1”; RPKM “0.8914”; cov |
| | | | | | “11.5098”; |
| chr10 | exon | 2717538 | 2721708 | − | gene_id “LGFS_NG20”; transcript_id |
| | | | | | “LGFS_NG20.1”; exon “1”; |
| chr10 | exon | 2722106 | 2723495 | − | gene_id “LGFS_NG20”; transcript_id |
| | | | | | “LGFS_NG20.1”; exon “2”; |
| chr10 | transcript | 3057432 | 3065690 | + | gene_id “LGFS_NG21”; transcript_id |
| | | | | | “LGFS_NG21.1”; RPKM “2.3966”; cov |
| | | | | | “30.9453”; |
| chr10 | exon | 3057432 | 3057803 | + | gene_id “LGFS_NG21”; transcript_id |
| | | | | | “LGFS_NG21.1”; exon “1”; |
| chr10 | exon | 3064639 | 3065690 | + | gene_id “LGFS_NG21”; transcript_id |
| | | | | | “LGFS_NG21.1”; exon “2”; |
| chr10 | transcript | 133484169 | 133490738 | − | gene_id “LGFS_NG22”; transcript_id |
| | | | | | “LGFS_NG22.1”; RPKM “1.2974”; cov |
| | | | | | “16.7518”; |
| chr10 | exon | 133484169 | 133487846 | − | gene_id “LGFS_NG22”; transcript_id |
| | | | | | “LGFS_NG22.1”; exon “1”; |
| chr10 | exon | 133487991 | 133489239 | − | gene_id “LGFS_NG22”; transcript_id |
| | | | | | “LGFS_NG22.1”; exon “2”; |
| chr10 | exon | 133489871 | 133490738 | − | gene_id “LGFS_NG22”; transcript_id |
| | | | | | “LGFS_NG22.1”; exon “3”; |
| chr10 | transcript | 133484169 | 133508852 | − | gene_id “LGFS_NG22”; transcript_id |
| | | | | | “LGFS_NG22.2”; RPKM “1.3602”; cov |
| | | | | | “17.5633”; |
| chr10 | exon | 133484169 | 133487846 | − | gene_id “LGFS_NG22”; transcript_id |
| | | | | | “LGFS_NG22.2”; exon “1”; |
| chr10 | exon | 133487991 | 133489239 | − | gene_id “LGFS_NG22”; transcript_id |
| | | | | | “LGFS_NG22.2”; exon “2”; |
| chr10 | exon | 133489871 | 133490067 | − | gene_id “LGFS_NG22”; transcript_id |
| | | | | | “LGFS_NG22.2”; exon “3”; |
| chr10 | exon | 133503654 | 133503887 | − | gene_id “LGFS_NG22”; transcript_id |
| | | | | | “LGFS_NG22.2”; exon “4”; |
| chr10 | exon | 133507888 | 133508852 | − | gene_id “LGFS_NG22”; transcript_id |
| | | | | | “LGFS_NG22.2”; exon “5”; |
| chr10 | transcript | 133952078 | 133956557 | − | gene_id “LGFS_NG23”; transcript_id |
| | | | | | “LGFS_NG23.1”; RPKM “1.0552”; cov |
| | | | | | “13.6244”; |
| chr10 | exon | 133952078 | 133955051 | − | gene_id “LGFS_NG23”; transcript_id |
| | | | | | “LGFS_NG23.1”; exon “1”; |
| chr10 | exon | 133955384 | 133956557 | − | gene_id “LGFS_NG23”; transcript_id |
| | | | | | “LGFS_NG23.1”; exon “2”; |
| chr10 | transcript | 133952078 | 133956557 | − | gene_id “LGFS_NG23”; transcript_id |
| | | | | | “LGFS_NG23.2”; RPKM “3.8085”; cov |
| | | | | | “49.1765”; |
| chr10 | exon | 133952078 | 133956557 | − | gene_id “LGFS_NG23”; transcript_id |
| | | | | | “LGFS_NG23.2”; exon “1”; |
| chr11 | transcript | 744567 | 744849 | + | gene_id “LGFS_NG24”; transcript_id |
| | | | | | “LGFS_NG24.1”; RPKM “17.5981”; cov |
| | | | | | “227.2297”; |
| chr11 | exon | 744567 | 744849 | + | gene_id “LGFS_NG24”; transcript_id |
| | | | | | “LGFS_NG24.1”; exon “1”; |
| chr12 | transcript | 9479672 | 9508176 | + | gene_id “LGFS_NG25”; transcript_id |
| | | | | | “LGFS_NG25.1”; RPKM “0.8729”; cov |
| | | | | | “11.2711”; |
| chr12 | exon | 9479672 | 9480389 | + | gene_id “LGFS_NG25”; transcript_id |
| | | | | | “LGFS_NG25.1”; exon “1”; |
| chr12 | exon | 9493053 | 9493802 | + | gene_id “LGFS_NG25”; transcript_id |
| | | | | | “LGFS_NG25.1”; exon “2”; |
| chr12 | exon | 9494420 | 9494557 | + | gene_id “LGFS_NG25”; transcript_id |
| | | | | | “LGFS_NG25.1”; exon “3”; |
| chr12 | exon | 9498775 | 9498941 | + | gene_id “LGFS_NG25”; transcript_id |
| | | | | | “LGFS_NG25.1”; exon “4”; |
| chr12 | exon | 9499362 | 9499528 | + | gene_id “LGFS_NG25”; transcript_id |
| | | | | | “LGFS_NG25.1”; exon “5”; |
| chr12 | exon | 9500555 | 9500621 | + | gene_id “LGFS_NG25”; transcript_id |
| | | | | | “LGFS_NG25.1”; exon “6”; |
| chr12 | exon | 9502613 | 9504969 | + | gene_id “LGFS_NG25”; transcript_id |
| | | | | | “LGFS_NG25.1”; exon “7”; |
| chr12 | exon | 9505014 | 9508176 | + | gene_id “LGFS_NG25”; transcript_id |
| | | | | | “LGFS_NG25.1”; exon “8”; |
| chr12 | transcript | 9479672 | 9508176 | + | gene_id “LGFS_NG25”; transcript_id |
| | | | | | “LGFS_NG25.2”; RPKM “1.8003”; cov |
| | | | | | “23.2463”; |
| chr12 | exon | 9479672 | 9480389 | + | gene_id “LGFS_NG25”; transcript_id |
| | | | | | “LGFS_NG25.2”; exon “1”; |
| chr12 | exon | 9493053 | 9493802 | + | gene_id “LGFS_NG25”; transcript_id |
| | | | | | “LGFS_NG25.2”; exon “2”; |
| chr12 | exon | 9498775 | 9498941 | + | gene_id “LGFS_NG25”; transcript_id |
| | | | | | “LGFS_NG25.2”; exon “3”; |
| chr12 | exon | 9499362 | 9499528 | + | gene_id “LGFS_NG25”; transcript_id |
| | | | | | “LGFS_NG25.2”; exon “4”; |
| chr12 | exon | 9500555 | 9500621 | + | gene_id “LGFS_NG25”; transcript_id |
| | | | | | “LGFS_NG25.2”; exon “5”; |
| chr12 | exon | 9502613 | 9504969 | + | gene_id “LGFS_NG25”; transcript_id |
| | | | | | “LGFS_NG25.2”; exon “6”; |
| chr12 | exon | 9505014 | 9508176 | + | gene_id “LGFS_NG25”; transcript_id |
| | | | | | “LGFS_NG25.2”; exon “7”; |
| chr12 | transcript | 110525134 | 110528865 | − | gene_id “LGFS_NG26”; transcript_id |
| | | | | | “LGFS_NG26.1”; RPKM “1.4572”; cov |
| | | | | | “18.8160”; |
| chr12 | exon | 110525134 | 110527451 | − | gene_id “LGFS_NG26”; transcript_id |
| | | | | | “LGFS_NG26.1”; exon “1”; |
| chr12 | exon | 110528747 | 110528865 | − | gene_id “LGFS_NG26”; transcript_id |
| | | | | | “LGFS_NG26.1”; exon “2”; |
| chr12 | transcript | 131941007 | 131943876 | + | gene_id “LGFS_NG27”; transcript_id |
| | | | | | “LGFS_NG27.1”; RPKM “0.7775”; cov |
| | | | | | “10.0390”; |
| chr12 | exon | 131941007 | 131942198 | + | gene_id “LGFS_NG27”; transcript_id |
| | | | | | “LGFS_NG27.1”; exon “1”; |
| chr12 | exon | 131942548 | 131943876 | + | gene_id “LGFS_NG27”; transcript_id |
| | | | | | “LGFS_NG27.1”; exon “2”; |
| chr12 | transcript | 131941007 | 131943876 | + | gene_id “LGFS_NG27”; transcript_id |
| | | | | | “LGFS_NG27.2”; RPKM “4.6524”; cov |
| | | | | | “60.0726”; |
| chr12 | exon | 131941007 | 131943876 | + | gene_id “LGFS_NG27”; transcript_id |
| | | | | | “LGFS_NG27.2”; exon “1”; |
| chr13 | transcript | 114771820 | 114773546 | + | gene_id “LGFS_NG29”; transcript_id |
| | | | | | “LGFS_NG29.2”; RPKM “1.6462”; cov |
| | | | | | “21.2566”; |
| chr13 | exon | 114771820 | 114771869 | + | gene_id “LGFS_NG29”; transcript_id |
| | | | | | “LGFS_NG29.2”; exon “1”; |
| chr13 | exon | 114772887 | 114773546 | + | gene_id “LGFS_NG29”; transcript_id |
| | | | | | “LGFS_NG29.2”; exon “2”; |
| chr13 | transcript | 114772735 | 114773546 | + | gene_id “LGFS_NG29”; transcript_id |
| | | | | | “LGFS_NG29.1”; RPKM “4.3671”; cov |
| | | | | | “56.3894”; |
| chr13 | exon | 114772735 | 114773546 | + | gene_id “LGFS_NG29”; transcript_id |
| | | | | | “LGFS_NG29.1”; exon “1”; |
| chr13 | transcript | 114773614 | 114776189 | + | gene_id “LGFS_NG30”; transcript_id |
| | | | | | “LGFS_NG30.1”; RPKM “3.9277”; cov |
| | | | | | “50.7157”; |
| chr13 | exon | 114773614 | 114776189 | + | gene_id “LGFS_NG30”; transcript_id |
| | | | | | “LGFS_NG30.1”; exon “1”; |
| chr13 | transcript | 114779389 | 114792981 | + | gene_id “LGFS_NG30”; transcript_id |
| | | | | | “LGFS_NG30.2”; RPKM “3.7448”; cov |
| | | | | | “48.3539”; |
| chr13 | exon | 114779389 | 114785469 | + | gene_id “LGFS_NG30”; transcript_id |
| | | | | | “LGFS_NG30.2”; exon “1”; |
| chr13 | exon | 114785511 | 114792981 | + | gene_id “LGFS_NG30”; transcript_id |
| | | | | | “LGFS_NG30.2”; exon “2”; |
| chr13 | transcript | 114779389 | 114792981 | + | gene_id “LGFS_NG30”; transcript_id |
| | | | | | “LGFS_NG30.3”; RPKM “3.2017”; cov |
| | | | | | “41.3409”; |
| chr13 | exon | 114779389 | 114785469 | + | gene_id “LGFS_NG30”; transcript_id |
| | | | | | “LGFS_NG30.3”; exon “1”; |
| chr13 | exon | 114785550 | 114785588 | + | gene_id “LGFS_NG30”; transcript_id |
| | | | | | “LGFS_NG30.3”; exon “2”; |
| chr13 | exon | 114785669 | 114792981 | + | gene_id “LGFS_NG30”; transcript_id |
| | | | | | “LGFS_NG30.3”; exon “3”; |
| chr13 | transcript | 114779389 | 114792981 | + | gene_id “LGFS_NG30”; transcript_id |
| | | | | | “LGFS_NG30.4”; RPKM “1.1265”; cov |
| | | | | | “14.5458”; |
| chr13 | exon | 114779389 | 114785469 | + | gene_id “LGFS_NG30”; transcript_id |
| | | | | | “LGFS_NG30.4”; exon “1”; |
| chr13 | exon | 114785550 | 114792981 | + | gene_id “LGFS_NG30”; transcript_id |
| | | | | | “LGFS_NG30.4”; exon “2”; |
| chr13 | transcript | 114776253 | 114779358 | + | gene_id “LGFS_NG28”; transcript_id |
| | | | | | “LGFS_NG28.1”; RPKM “15.8583”; cov |
| | | | | | “204.7648”; |
| chr13 | exon | 114776253 | 114779358 | + | gene_id “LGFS_NG28”; transcript_id |
| | | | | | “LGFS_NG28.1”; exon “1”; |
| chr16 | transcript | 87174036 | 87178840 | + | gene_id “LGFS_NG31”; transcript_id |
| | | | | | “LGFS_NG31.1”; RPKM “8.7782”; cov |
| | | | | | “113.3456”; |
| chr16 | exon | 87174036 | 87178840 | + | gene_id “LGFS_NG31”; transcript_id |
| | | | | | “LGFS_NG31.1”; exon “1”; |
| chr17 | transcript | 78724631 | 78728879 | − | gene_id “LGFS_NG32”; transcript_id |
| | | | | | “LGFS_NG32.1”; RPKM “4.9448”; cov |
| | | | | | “63.8475”; |
| chr17 | exon | 78724631 | 78728324 | − | gene_id “LGFS_NG32”; transcript_id |
| | | | | | “LGFS_NG32.1”; exon “1”; |
| chr17 | exon | 78728674 | 78728879 | − | gene_id “LGFS_NG32”; transcript_id |
| | | | | | “LGFS_NG32.1”; exon “2”; |
| chr17 | transcript | 78724631 | 78728879 | − | gene_id “LGFS_NG32”; transcript_id |
| | | | | | “LGFS_NG32.2”; RPKM “22.3830”; cov |
| | | | | | “289.0130”; |
| chr17 | exon | 78724631 | 78728879 | − | gene_id “LGFS_NG32”; transcript_id |
| | | | | | “LGFS_NG32.2”; exon “1”; |
| chr18 | transcript | 6564865 | 6647080 | − | gene_id “LGFS_NG33”; transcript_id |
| | | | | | “LGFS_NG33.1”; RPKM “0.9888”; cov |
| | | | | | “12.7681”; |
| chr18 | exon | 6564865 | 6569057 | − | gene_id “LGFS_NG33”; transcript_id |
| | | | | | “LGFS_NG33.1”; exon “1”; |
| chr18 | exon | 6646484 | 6647080 | − | gene_id “LGFS_NG33”; transcript_id |
| | | | | | “LGFS_NG33.1”; exon “2”; |
| chr18 | transcript | 76568440 | 76569310 | − | gene_id “LGFS_NG34”; transcript_id |
| | | | | | “LGFS_NG34.1”; RPKM “3.6479”; cov |
| | | | | | “47.1021”; |
| chr18 | exon | 76568440 | 76569310 | − | gene_id “LGFS_NG34”; transcript_id |
| | | | | | “LGFS_NG34.1”; exon “1”; |
| chr18 | transcript | 76569320 | 76569806 | − | gene_id “LGFS_NG35”; transcript_id |
| | | | | | “LGFS_NG35.1”; RPKM “4.1581”; cov |
| | | | | | “53.6899”; |
| chr18 | exon | 76569320 | 76569806 | − | gene_id “LGFS_NG35”; transcript_id |
| | | | | | “LGFS_NG35.1”; exon “1”; |
| chr18 | transcript | 76570193 | 76574891 | − | gene_id “LGFS_NG36”; transcript_id |
| | | | | | “LGFS_NG36.1”; RPKM “3.3934”; cov |
| | | | | | “43.8161”; |
| chr18 | exon | 76570193 | 76574226 | − | gene_id “LGFS_NG36”; transcript_id |
| | | | | | “LGFS_NG36.1”; exon “1”; |
| chr18 | exon | 76574412 | 76574891 | − | gene_id “LGFS_NG36”; transcript_id |
| | | | | | “LGFS_NG36.1”; exon “2”; |
| chr19 | transcript | 21880472 | 21880758 | − | gene_id “LGFS_NG37”; transcript_id |
| | | | | | “LGFS_NG37.1”; RPKM “4.5531”; cov |
| | | | | | “58.7909”; |
| chr19 | exon | 21880472 | 21880758 | − | gene_id “LGFS_NG37”; transcript_id |
| | | | | | “LGFS_NG37.1”; exon “1”; |
| chr19 | transcript | 36062967 | 36078361 | − | gene_id “LGFS_NG38”; transcript_id |
| | | | | | “LGFS_NG38.1”; RPKM “0.9995”; cov |
| | | | | | “12.9055”; |
| chr19 | exon | 36062967 | 36063433 | − | gene_id “LGFS_NG38”; transcript_id |
| | | | | | “LGFS_NG38.1”; exon “1”; |
| chr19 | exon | 36065131 | 36065421 | − | gene_id “LGFS_NG38”; transcript_id |
| | | | | | “LGFS_NG38.1”; exon “2”; |
| chr19 | exon | 36078251 | 36078361 | − | gene_id “LGFS_NG38”; transcript_id |
| | | | | | “LGFS_NG38.1”; exon “3”; |
| chr19 | transcript | 36062967 | 36066499 | − | gene_id “LGFS_NG38”; transcript_id |
| | | | | | “LGFS_NG38.2”; RPKM “1.5987”; cov |
| | | | | | “20.6433”; |
| chr19 | exon | 36062967 | 36066499 | − | gene_id “LGFS_NG38”; transcript_id |
| | | | | | “LGFS_NG38.2”; exon “1”; |
| chr19 | transcript | 36062967 | 36078361 | − | gene_id “LGFS_NG38”; transcript_id |
| | | | | | “LGFS_NG38.3”; RPKM “1.6121”; cov |
| | | | | | “20.8160”; |
| chr19 | exon | 36062967 | 36065421 | − | gene_id “LGFS_NG38”; transcript_id |
| | | | | | “LGFS_NG38.3”; exon “1”; |
| chr19 | exon | 36078251 | 36078361 | − | gene_id “LGFS_NG38”; transcript_id |
| | | | | | “LGFS_NG38.3”; exon “2”; |
| chr2 | transcript | 918918 | 927590 | − | gene_id “LGFS_NG1”; transcript_id |
| | | | | | “LGFS_NG1.2”; RPKM “0.9455”; cov |
| | | | | | “12.2087”; |
| chr2 | exon | 918918 | 923733 | − | gene_id “LGFS_NG1”; transcript_id |
| | | | | | “LGFS_NG1.2”; exon “1”; |
| chr2 | exon | 924136 | 927590 | − | gene_id “LGFS_NG1”; transcript_id |
| | | | | | “LGFS_NG1.2”; exon “2”; |
| chr2 | transcript | 927932 | 929843 | − | gene_id “LGFS_NG1”; transcript_id |
| | | | | | “LGFS_NG1.1”; RPKM “0.8706”; cov |
| | | | | | “11.2410”; |
| chr2 | exon | 927932 | 928406 | − | gene_id “LGFS_NG1”; transcript_id |
| | | | | | “LGFS_NG1.1”; exon “1”; |
| chr2 | exon | 929520 | 929843 | − | gene_id “LGFS_NG1”; transcript_id |
| | | | | | “LGFS_NG1.1”; exon “2”; |
| chr2 | transcript | 52282569 | 52687122 | − | gene_id “LGFS_NG2”; transcript_id |
| | | | | | “LGFS_NG2.1”; RPKM “1.1419”; cov |
| | | | | | “14.7438”; |
| chr2 | exon | 52282569 | 52288567 | − | gene_id “LGFS_NG2”; transcript_id |
| | | | | | “LGFS_NG2.1”; exon “1”; |
| chr2 | exon | 52306971 | 52307069 | − | gene_id “LGFS_NG2”; transcript_id |
| | | | | | “LGFS_NG2.1”; exon “2”; |
| chr2 | exon | 52415416 | 52415490 | − | gene_id “LGFS_NG2”; transcript_id |
| | | | | | “LGFS_NG2.1”; exon “3”; |
| chr2 | exon | 52496887 | 52497096 | − | gene_id “LGFS_NG2”; transcript_id |
| | | | | | “LGFS_NG2.1”; exon “4”; |
| chr2 | exon | 52686843 | 52687122 | − | gene_id “LGFS_NG2”; transcript_id |
| | | | | | “LGFS_NG2.1”; exon “5”; |
| chr2 | transcript | 236014679 | 236046232 | + | gene_id “LGFS_NG3”; transcript_id |
| | | | | | “LGFS_NG3.1”; RPKM “2.5524”; cov |
| | | | | | “32.9572”; |
| chr2 | exon | 236014679 | 236014921 | + | gene_id “LGFS_NG3”; transcript_id |
| | | | | | “LGFS_NG3.1”; exon “1”; |
| chr2 | exon | 236043314 | 236046232 | + | gene_id “LGFS_NG3”; transcript_id |
| | | | | | “LGFS_NG3.1”; exon “2”; |
| chr20 | transcript | 16225622 | 16238481 | − | gene_id “LGFS_NG39”; transcript_id |
| | | | | | “LGFS_NG39.1”; RPKM “1.4572”; cov |
| | | | | | “18.8159”; |
| chr20 | exon | 16225622 | 16227234 | − | gene_id “LGFS_NG39”; transcript_id |
| | | | | | “LGFS_NG39.1”; exon “1”; |
| chr20 | exon | 16237581 | 16238481 | − | gene_id “LGFS_NG39”; transcript_id |
| | | | | | “LGFS_NG39.1”; exon “2”; |
| chr20 | transcript | 16225622 | 16238481 | − | gene_id “LGFS_NG39”; transcript_id |
| | | | | | “LGFS_NG39.2”; RPKM “4.5460”; cov |
| | | | | | “58.6994”; |
| chr20 | exon | 16225622 | 16229187 | − | gene_id “LGFS_NG39”; transcript_id |
| | | | | | “LGFS_NG39.2”; exon “1”; |
| chr20 | exon | 16237581 | 16238481 | − | gene_id “LGFS_NG39”; transcript_id |
| | | | | | “LGFS_NG39.2”; exon “2”; |
| chr20 | transcript | 16225622 | 16238481 | − | gene_id “LGFS_NG39”; transcript_id |
| | | | | | “LGFS_NG39.3”; RPKM “1.6825”; cov |
| | | | | | “21.7252”; |
| chr20 | exon | 16225622 | 16229187 | − | gene_id “LGFS_NG39”; transcript_id |
| | | | | | “LGFS_NG39.3”; exon “1”; |
| chr20 | exon | 16235951 | 16236245 | − | gene_id “LGFS_NG39”; transcript_id |
| | | | | | “LGFS_NG39.3”; exon “2”; |
| chr20 | exon | 16237581 | 16238481 | − | gene_id “LGFS_NG39”; transcript_id |
| | | | | | “LGFS_NG39.3”; exon “3”; |
| chr20 | transcript | 16225622 | 16238481 | − | gene_id “LGFS_NG39”; transcript_id |
| | | | | | “LGFS_NG39.4”; RPKM “6.2200”; cov |
| | | | | | “80.3137”; |
| chr20 | exon | 16225622 | 16238481 | − | gene_id “LGFS_NG39”; transcript_id |
| | | | | | “LGFS_NG39.4”; exon “1”; |
| chr20 | transcript | 60948873 | 60954213 | − | gene_id “LGFS_NG40”; transcript_id |
| | | | | | “LGFS_NG40.1”; RPKM “2.5232”; cov |
| | | | | | “32.5794”; |
| chr20 | exon | 60948873 | 60954213 | − | gene_id “LGFS_NG40”; transcript_id |
| | | | | | “LGFS_NG40.1”; exon “1”; |
| chr21 | transcript | 45613809 | 45617644 | − | gene_id “LGFS_NG41”; transcript_id |
| | | | | | “LGFS_NG41.1”; RPKM “3.9217”; cov |
| | | | | | “50.6375”; |
| chr21 | exon | 45613809 | 45617644 | − | gene_id “LGFS_NG41”; transcript_id |
| | | | | | “LGFS_NG41.1”; exon “1”; |
| chr21 | transcript | 46436885 | 46438642 | − | gene_id “LGFS_NG42”; transcript_id |
| | | | | | “LGFS_NG42.1”; RPKM “7.6262”; cov |
| | | | | | “98.4709”; |
| chr21 | exon | 46436885 | 46438642 | − | gene_id “LGFS_NG42”; transcript_id |
| | | | | | “LGFS_NG42.1”; exon “1”; |
| chr21 | transcript | 46439040 | 46440703 | − | gene_id “LGFS_NG43”; transcript_id |
| | | | | | “LGFS_NG43.1”; RPKM “0.8014”; cov |
| | | | | | “10.3478”; |
| chr21 | exon | 46439040 | 46439772 | − | gene_id “LGFS_NG43”; transcript_id |
| | | | | | “LGFS_NG43.1”; exon “1”; |
| chr21 | exon | 46439865 | 46440703 | − | gene_id “LGFS_NG43”; transcript_id |
| | | | | | “LGFS_NG43.1”; exon “2”; |
| chr21 | transcript | 46439040 | 46440703 | − | gene_id “LGFS_NG43”; transcript_id |
| | | | | | “LGFS_NG43.2”; RPKM “1.0897”; cov |
| | | | | | “14.0706”; |
| chr21 | exon | 46439040 | 46439459 | − | gene_id “LGFS_NG43”; transcript_id |
| | | | | | “LGFS_NG43.2”; exon “1”; |
| chr21 | exon | 46439627 | 46440703 | − | gene_id “LGFS_NG43”; transcript_id |
| | | | | | “LGFS_NG43.2”; exon “2”; |
| chr21 | transcript | 46439040 | 46440703 | − | gene_id “LGFS_NG43”; transcript_id |
| | | | | | “LGFS_NG43.3”; RPKM “1.6567”; cov |
| | | | | | “21.3913”; |
| chr21 | exon | 46439040 | 46440703 | − | gene_id “LGFS_NG43”; transcript_id |
| | | | | | “LGFS_NG43.3”; exon “1”; |
| chr3 | transcript | 32856881 | 32857230 | + | gene_id “LGFS_NG4”; transcript_id |
| | | | | | “LGFS_NG4.1”; RPKM “2.1430”; cov |
| | | | | | “27.6714”; |
| chr3 | exon | 32856881 | 32857230 | + | gene_id “LGFS_NG4”; transcript_id |
| | | | | | “LGFS_NG4.1”; exon “1”; |
| chr3 | transcript | 77830044 | 77830414 | + | gene_id “LGFS_NG5”; transcript_id |
| | | | | | “LGFS_NG5.1”; RPKM “5.5118”; cov |
| | | | | | “71.1698”; |
| chr3 | exon | 77830044 | 77830414 | + | gene_id “LGFS_NG5”; transcript_id |
| | | | | | “LGFS_NG5.1”; exon “1”; |
| chr3 | transcript | 193991118 | 193993494 | + | gene_id “LGFS_NG6”; transcript_id |
| | | | | | “LGFS_NG6.1”; RPKM “3.4515”; cov |
| | | | | | “44.5670”; |
| chr3 | exon | 193991118 | 193993494 | + | gene_id “LGFS_NG6”; transcript_id |
| | | | | | “LGFS_NG6.1”; exon “1”; |
| chr3 | transcript | 193993562 | 193994357 | + | gene_id “LGFS_NG7”; transcript_id |
| | | | | | “LGFS_NG7.1”; RPKM “1.8492”; cov |
| | | | | | “23.8777”; |
| chr3 | exon | 193993562 | 193994357 | + | gene_id “LGFS_NG7”; transcript_id |
| | | | | | “LGFS_NG7.1”; exon “1”; |
| chr3 | transcript | 195546095 | 195546686 | + | gene_id “LGFS_NG8”; transcript_id |
| | | | | | “LGFS_NG8.1”; RPKM “2.5985”; cov |
| | | | | | “33.5524”; |
| chr3 | exon | 195546095 | 195546686 | + | gene_id “LGFS_NG8”; transcript_id |
| | | | | | “LGFS_NG8.1”; exon “1”; |
| chr4 | transcript | 1595164 | 1597919 | − | gene_id “LGFS_NG9”; transcript_id |
| | | | | | “LGFS_NG9.1”; RPKM “2.5235”; cov |
| | | | | | “32.5843”; |
| chr4 | exon | 1595164 | 1597919 | − | gene_id “LGFS_NG9”; transcript_id |
| | | | | | “LGFS_NG9.1”; exon “1”; |
| chr4 | transcript | 1563636 | 1565411 | − | gene_id “LGFS_NG10”; transcript_id |
| | | | | | “LGFS_NG10.1”; RPKM “2.1116”; cov |
| | | | | | “27.2658”; |
| chr4 | exon | 1563636 | 1565411 | − | gene_id “LGFS_NG10”; transcript_id |
| | | | | | “LGFS_NG10.1”; exon “1”; |
| chr4 | transcript | 1569202 | 1570351 | − | gene_id “LGFS_NG11”; transcript_id |
| | | | | | “LGFS_NG11.1”; RPKM “1.7834”; cov |
| | | | | | “23.0278”; |
| chr4 | exon | 1569202 | 1570351 | − | gene_id “LGFS_NG11”; transcript_id |
| | | | | | “LGFS_NG11.1”; exon “1”; |
| chr4 | transcript | 161467437 | 161747178 | − | gene_id “LGFS_NG12”; transcript_id |
| | | | | | “LGFS_NG12.1”; RPKM “2.0796”; cov |
| | | | | | “26.8517”; |
| chr4 | exon | 161467437 | 161475312 | − | gene_id “LGFS_NG12”; transcript_id |
| | | | | | “LGFS_NG12.1”; exon “1”; |
| chr4 | exon | 161477177 | 161477250 | − | gene_id “LGFS_NG12”; transcript_id |
| | | | | | “LGFS_NG12.1”; exon “2”; |
| chr4 | exon | 161480550 | 161480692 | − | gene_id “LGFS_NG12”; transcript_id |
| | | | | | “LGFS_NG12.1”; exon “3”; |
| chr4 | exon | 161590109 | 161590220 | − | gene_id “LGFS_NG12”; transcript_id |
| | | | | | “LGFS_NG12.1”; exon “4”; |
| chr4 | exon | 161746934 | 161747178 | − | gene_id “LGFS_NG12”; transcript_id |
| | | | | | “LGFS_NG12.1”; exon “5”; |
| chr4 | transcript | 161467437 | 161747178 | − | gene_id “LGFS_NG12”; transcript_id |
| | | | | | “LGFS_NG12.2”; RPKM “1.1556”; cov |
| | | | | | “14.9208”; |
| chr4 | exon | 161467437 | 161477250 | − | gene_id “LGFS_NG12”; transcript_id |
| | | | | | “LGFS_NG12.2”; exon “1”; |
| chr4 | exon | 161480550 | 161480692 | − | gene_id “LGFS_NG12”; transcript_id |
| | | | | | “LGFS_NG12.2”; exon “2”; |
| chr4 | exon | 161590109 | 161590220 | − | gene_id “LGFS_NG12”; transcript_id |
| | | | | | “LGFS_NG12.2”; exon “3”; |
| chr4 | exon | 161746934 | 161747178 | − | gene_id “LGFS_NG12”; transcript_id |
| | | | | | “LGFS_NG12.2”; exon “4”; |
| chr5 | transcript | 1748243 | 1752448 | − | gene_id “LGFS_NG13”; transcript_id |
| | | | | | “LGFS_NG13.1”; RPKM “1.4604”; cov |
| | | | | | “18.8576”; |
| chr5 | exon | 1748243 | 1748621 | − | gene_id “LGFS_NG13”; transcript_id |
| | | | | | “LGFS_NG13.1”; exon “1”; |
| chr5 | exon | 1751766 | 1751909 | − | gene_id “LGFS_NG13”; transcript_id |
| | | | | | “LGFS_NG13.1”; exon “2”; |
| chr5 | exon | 1752145 | 1752448 | − | gene_id “LGFS_NG13”; transcript_id |
| | | | | | “LGFS_NG13.1”; exon “3”; |
| chr5 | transcript | 1748243 | 1752448 | − | gene_id “LGFS_NG13”; transcript_id |
| | | | | | “LGFS_NG13.2”; RPKM “1.5637”; cov |
| | | | | | “20.1905”; |
| chr5 | exon | 1748243 | 1748621 | − | gene_id “LGFS_NG13”; transcript_id |
| | | | | | “LGFS_NG13.2”; exon “1”; |
| chr5 | exon | 1751766 | 1752448 | − | gene_id “LGFS_NG13”; transcript_id |
| | | | | | “LGFS_NG13.2”; exon “2”; |
| chr6 | transcript | 792810 | 797245 | + | gene_id “LGFS_NG14”; transcript_id |
| | | | | | “LGFS_NG14.1”; RPKM “3.4413”; cov |
| | | | | | “44.4351”; |
| chr6 | exon | 792810 | 797245 | + | gene_id “LGFS_NG14”; transcript_id |
| | | | | | “LGFS_NG14.1”; exon “1”; |
| chr7 | transcript | 149670553 | 149678196 | − | gene_id “LGFS_NG15”; transcript_id |
| | | | | | “LGFS_NG15.1”; RPKM “3.5145”; cov |
| | | | | | “45.3805”; |
| chr7 | exon | 149670553 | 149678196 | − | gene_id “LGFS_NG15”; transcript_id |
| | | | | | “LGFS_NG15.1”; exon “1”; |
| chr7 | transcript | 152246961 | 152263275 | − | gene_id “LGFS_NG16”; transcript_id |
| | | | | | “LGFS_NG16.1”; RPKM “1.3525”; cov |
| | | | | | “17.4633”; |
| chr7 | exon | 152246961 | 152247702 | − | gene_id “LGFS_NG16”; transcript_id |
| | | | | | “LGFS_NG16.1”; exon “1”; |
| chr7 | exon | 152247887 | 152247962 | − | gene_id “LGFS_NG16”; transcript_id |
| | | | | | “LGFS_NG16.1”; exon “2”; |
| chr7 | exon | 152256248 | 152256391 | − | gene_id “LGFS_NG16”; transcript_id |
| | | | | | “LGFS_NG16.1”; exon “3”; |
| chr7 | exon | 152262674 | 152263275 | − | gene_id “LGFS_NG16”; transcript_id |
| | | | | | “LGFS_NG16.1”; exon “4”; |
| chr7 | transcript | 152246961 | 152263275 | − | gene_id “LGFS_NG16”; transcript_id |
| | | | | | “LGFS_NG16.2”; RPKM “5.1906”; cov |
| | | | | | “67.0218”; |
| chr7 | exon | 152246961 | 152247702 | − | gene_id “LGFS_NG16”; transcript_id |
| | | | | | “LGFS_NG16.2”; exon “1”; |
| chr7 | exon | 152247887 | 152247962 | − | gene_id “LGFS_NG16”; transcript_id |
| | | | | | “LGFS_NG16.2”; exon “2”; |
| chr7 | exon | 152262674 | 152263275 | − | gene_id “LGFS_NG16”; transcript_id |
| | | | | | “LGFS_NG16.2”; exon “3”; |
| chr7 | transcript | 152246961 | 152263275 | − | gene_id “LGFS_NG16”; transcript_id |
| | | | | | “LGFS_NG16.3”; RPKM “1.6603”; cov |
| | | | | | “21.4379”; |
| chr7 | exon | 152246961 | 152247962 | − | gene_id “LGFS_NG16”; transcript_id |
| | | | | | “LGFS_NG16.3”; exon “1”; |
| chr7 | exon | 152262674 | 152263275 | − | gene_id “LGFS_NG16”; transcript_id |
| | | | | | “LGFS_NG16.3”; exon “2”; |
| chr7 | transcript | 152246961 | 152263275 | − | gene_id “LGFS_NG16”; transcript_id |
| | | | | | “LGFS_NG16.4”; RPKM “2.7724”; cov |
| | | | | | “35.7975”; |
| chr7 | exon | 152246961 | 152247649 | − | gene_id “LGFS_NG16”; transcript_id |
| | | | | | “LGFS_NG16.4”; exon “1”; |
| chr7 | exon | 152247887 | 152247962 | − | gene_id “LGFS_NG16”; transcript_id |
| | | | | | “LGFS_NG16.4”; exon “2”; |
| chr7 | exon | 152262674 | 152263275 | − | gene_id “LGFS_NG16”; transcript_id |
| | | | | | “LGFS_NG16.4”; exon “3”; |
| chr7 | transcript | 157652510 | 157659496 | − | gene_id “LGFS_NG17”; transcript_id |
| | | | | | “LGFS_NG17.1”; RPKM “4.4823”; cov |
| | | | | | “57.8762”; |
| chr7 | exon | 157652510 | 157659496 | − | gene_id “LGFS_NG17”; transcript_id |
| | | | | | “LGFS_NG17.1”; exon “1”; |
| chr7 | transcript | 157660018 | 157664994 | − | gene_id “LGFS_NG17”; transcript_id |
| | | | | | “LGFS_NG17.2”; RPKM “3.1830”; cov |
| | | | | | “41.0996”; |
| chr7 | exon | 157660018 | 157664994 | − | gene_id “LGFS_NG17”; transcript_id |
| | | | | | “LGFS_NG17.2”; exon “1”; |
| chr8 | transcript | 1258226 | 1261162 | + | gene_id “LGFS_NG18”; transcript_id |
| | | | | | “LGFS_NG18.1”; RPKM “1.6657”; cov |
| | | | | | “21.5073”; |
| chr8 | exon | 1258226 | 1261162 | + | gene_id “LGFS_NG18”; transcript_id |
| | | | | | “LGFS_NG18.1”; exon “1”; |
| chr9 | transcript | 138444994 | 138446508 | + | gene_id “LGFS_NG19”; transcript_id |
| | | | | | “LGFS_NG19.1”; RPKM “1.3338”; cov |
| | | | | | “17.2217”; |
| chr9 | exon | 138444994 | 138445373 | + | gene_id “LGFS_NG19”; transcript_id |
| | | | | | “LGFS_NG19.1”; exon “1”; |
| chr9 | exon | 138445507 | 138446508 | + | gene_id “LGFS_NG19”; transcript_id |
| | | | | | “LGFS_NG19.1”; exon “2”; |
| chrX | transcript | 569266 | 579257 | − | gene_id “LGFS_NG44”; transcript_id |
| | | | | | “LGFS_NG44.1”; RPKM “2.2858”; cov |
| | | | | | “29.5148”; |
| chrX | exon | 569266 | 569381 | − | gene_id “LGFS_NG44”; transcript_id |
| | | | | | “LGFS_NG44.1”; exon “1”; |
| chrX | exon | 574611 | 574729 | − | gene_id “LGFS_NG44”; transcript_id |
| | | | | | “LGFS_NG44.1”; exon “2”; |
| chrX | exon | 574840 | 575188 | − | gene_id “LGFS_NG44”; transcript_id |
| | | | | | “LGFS_NG44.1”; exon “3”; |
| chrX | exon | 578262 | 579257 | − | gene_id “LGFS_NG44”; transcript_id |
| | | | | | “LGFS_NG44.1”; exon “4”; |
| chrX | transcript | 569266 | 585408 | − | gene_id “LGFS_NG44”; transcript_id |
| | | | | | “LGFS_NG44.2”; RPKM “1.9361”; cov |
| | | | | | “24.9988”; |
| chrX | exon | 569266 | 569381 | − | gene_id “LGFS_NG44”; transcript_id |
| | | | | | “LGFS_NG44.2”; exon “1”; |
| chrX | exon | 574611 | 574729 | − | gene_id “LGFS_NG44”; transcript_id |
| | | | | | “LGFS_NG44.2”; exon “2”; |
| chrX | exon | 574840 | 575188 | − | gene_id “LGFS_NG44”; transcript_id |
| | | | | | “LGFS_NG44.2”; exon “3”; |
| chrX | exon | 578262 | 578401 | − | gene_id “LGFS_NG44”; transcript_id |
| | | | | | “LGFS_NG44.2”; exon “4”; |
| chrX | exon | 580400 | 580520 | − | gene_id “LGFS_NG44”; transcript_id |
| | | | | | “LGFS_NG44.2”; exon “5”; |
| chrX | exon | 580954 | 581495 | − | gene_id “LGFS_NG44”; transcript_id |
| | | | | | “LGFS_NG44.2”; exon “6”; |
| chrX | exon | 584233 | 585408 | − | gene_id “LGFS_NG44”; transcript_id |
| | | | | | “LGFS_NG44.2”; exon “7”; |
| chrX | transcript | 572821 | 577946 | − | gene_id “LGFS_NG44”; transcript_id |
| | | | | | “LGFS_NG44.3”; RPKM “1.4510”; cov |
| | | | | | “18.7352”; |
| chrX | exon | 572821 | 574261 | − | gene_id “LGFS_NG44”; transcript_id |
| | | | | | “LGFS_NG44.3”; exon “1”; |
| chrX | exon | 574521 | 577946 | − | gene_id “LGFS_NG44”; transcript_id |
| | | | | | “LGFS_NG44.3”; exon “2”; |
| chrX | transcript | 572821 | 577946 | − | gene_id “LGFS_NG44”; transcript_id |
| | | | | | “LGFS_NG44.4”; RPKM “2.2981”; cov |
| | | | | | “29.6733”; |
| chrX | exon | 572821 | 577946 | − | gene_id “LGFS_NG44”; transcript_id |
| | | | | | “LGFS_NG44.4”; exon “1”; |
| chr1 | exon | 34784807 | 34785347 | − | gene_id “MCS_NG1”; transcript_id |
| | | | | | “MCS_NG1.1”; exon “1”; |
| chr1 | exon | 34790517 | 34790702 | − | gene_id “MCS_NG1”; transcript_id |
| | | | | | “MCS_NG1.1”; exon “2”; |
| chr1 | exon | 34796309 | 34796495 | − | gene_id “MCS_NG1”; transcript_id |
| | | | | | “MCS_NG1.1”; exon “3”; |
| chr1 | transcript | 157180582 | 157185792 | − | gene_id “MCS_NG2”; transcript_id |
| | | | | | “MCS_NG2.1”; RPKM “1.4970”; cov |
| | | | | | “31.3598”; |
| chr1 | exon | 157180582 | 157185792 | − | gene_id “MCS_NG2”; transcript_id |
| | | | | | “MCS_NG2.1”; exon “1”; |
| chr1 | transcript | 157191437 | 157249328 | − | gene_id “MCS_NG3”; transcript_id |
| | | | | | “MCS_NG3.2”; RPKM “1.2674”; cov |
| | | | | | “26.5487”; |
| chr1 | exon | 157191437 | 157195390 | − | gene_id “MCS_NG3”; transcript_id |
| | | | | | “MCS_NG3.2”; exon “1”; |
| chr1 | exon | 157195973 | 157196072 | − | gene_id “MCS_NG3”; transcript_id |
| | | | | | “MCS_NG3.2”; exon “2”; |
| chr1 | exon | 157222196 | 157222493 | − | gene_id “MCS_NG3”; transcript_id |
| | | | | | “MCS_NG3.2”; exon “3”; |
| chr1 | exon | 157248992 | 157249328 | − | gene_id “MCS_NG3”; transcript_id |
| | | | | | “MCS_NG3.2”; exon “4”; |
| chr1 | transcript | 157191437 | 157249328 | − | gene_id “MCS_NG3”; transcript_id |
| | | | | | “MCS_NG3.3”; RPKM “1.7347”; cov |
| | | | | | “36.3377”; |
| chr1 | exon | 157191437 | 157196072 | − | gene_id “MCS_NG3”; transcript_id |
| | | | | | “MCS_NG3.3”; exon “1”; |
| chr1 | exon | 157222196 | 157222493 | − | gene_id “MCS_NG3”; transcript_id |
| | | | | | “MCS_NG3.3”; exon “2”; |
| chr1 | exon | 157248992 | 157249328 | − | gene_id “MCS_NG3”; transcript_id |
| | | | | | “MCS_NG3.3”; exon “3”; |
| chr1 | transcript | 157191437 | 157249328 | − | gene_id “MCS_NG3”; transcript_id |
| | | | | | “MCS_NG3.4”; RPKM “0.9720”; cov |
| | | | | | “20.3623”; |
| chr1 | exon | 157191437 | 157199369 | − | gene_id “MCS_NG3”; transcript_id |
| | | | | | “MCS_NG3.4”; exon “1”; |
| chr1 | exon | 157222196 | 157222493 | − | gene_id “MCS_NG3”; transcript_id |
| | | | | | “MCS_NG3.4”; exon “2”; |
| chr1 | exon | 157248992 | 157249328 | − | gene_id “MCS_NG3”; transcript_id |
| | | | | | “MCS_NG3.4”; exon “3”; |
| chr1 | transcript | 157219685 | 157249328 | − | gene_id “MCS_NG3”; transcript_id |
| | | | | | “MCS_NG3.1”; RPKM “1.4025”; cov |
| | | | | | “29.3786”; |
| chr1 | exon | 157219685 | 157222493 | − | gene_id “MCS_NG3”; transcript_id |
| | | | | | “MCS_NG3.1”; exon “1”; |
| chr1 | exon | 157248992 | 157249328 | − | gene_id “MCS_NG3”; transcript_id |
| | | | | | “MCS_NG3.1”; exon “2”; |
| chr11 | transcript | 16040881 | 16069090 | + | gene_id “MCS_NG8”; transcript_id |
| | | | | | “MCS_NG8.1”; RPKM “0.7233”; cov |
| | | | | | “15.1523”; |
| chr11 | exon | 16040881 | 16041006 | + | gene_id “MCS_NG8”; transcript_id |
| | | | | | “MCS_NG8.1”; exon “1”; |
| chr11 | exon | 16063432 | 16063634 | + | gene_id “MCS_NG8”; transcript_id |
| | | | | | “MCS_NG8.1”; exon “2”; |
| chr11 | exon | 16067794 | 16067836 | + | gene_id “MCS_NG8”; transcript_id |
| | | | | | “MCS_NG8.1”; exon “3”; |
| chr11 | exon | 16068784 | 16069090 | + | gene_id “MCS_NG8”; transcript_id |
| | | | | | “MCS_NG8.1”; exon “4”; |
| chr11 | transcript | 16040881 | 16069090 | + | gene_id “MCS_NG8”; transcript_id |
| | | | | | “MCS_NG8.2”; RPKM “0.9597”; cov |
| | | | | | “20.1041”; |
| chr11 | exon | 16040881 | 16041006 | + | gene_id “MCS_NG8”; transcript_id |
| | | | | | “MCS_NG8.2”; exon “1”; |
| chr11 | exon | 16063432 | 16063634 | + | gene_id “MCS_NG8”; transcript_id |
| | | | | | “MCS_NG8.2”; exon “2”; |
| chr11 | exon | 16068784 | 16069090 | + | gene_id “MCS_NG8”; transcript_id |
| | | | | | “MCS_NG8.2”; exon “3”; |
| chr12 | transcript | 54124477 | 54128954 | − | gene_id “MCS_NG9”; transcript_id |
| | | | | | “MCS_NG9.1”; RPKM “1.1933”; cov |
| | | | | | “24.9969”; |
| chr12 | exon | 54124477 | 54128954 | − | gene_id “MCS_NG9”; transcript_id |
| | | | | | “MCS_NG9.1”; exon “1”; |
| chr16 | transcript | 70005696 | 70006778 | + | gene_id “MCS_NG10”; transcript_id |
| | | | | | “MCS_NG10.1”; RPKM “2.7994”; cov |
| | | | | | “58.6408”; |
| chr16 | exon | 70005696 | 70006778 | + | gene_id “MCS_NG10”; transcript_id |
| | | | | | “MCS_NG10.1”; exon “1”; |
| chr16 | transcript | 85880130 | 85881773 | + | gene_id “MCS_NG11”; transcript_id |
| | | | | | “MCS_NG11.1”; RPKM “0.5942”; cov |
| | | | | | “12.4473”; |
| chr16 | exon | 85880130 | 85880230 | + | gene_id “MCS_NG11”; transcript_id |
| | | | | | “MCS_NG11.1”; exon “1”; |
| chr16 | exon | 85881283 | 85881773 | + | gene_id “MCS_NG11”; transcript_id |
| | | | | | “MCS_NG11.1”; exon “2”; |
| chr3 | transcript | 193981277 | 193982729 | − | gene_id “MCS_NG4”; transcript_id |
| | | | | | “MCS_NG4.1”; RPKM “1.0808”; cov |
| | | | | | “22.6401”; |
| chr3 | exon | 193981277 | 193982729 | − | gene_id “MCS_NG4”; transcript_id |
| | | | | | “MCS_NG4.1”; exon “1”; |
| chr4 | transcript | 145120948 | 145132678 | − | gene_id “MCS_NG5”; transcript_id |
| | | | | | “MCS_NG5.1”; RPKM “0.9690”; cov |
| | | | | | “20.2988”; |
| chr4 | exon | 145120948 | 145123131 | − | gene_id “MCS_NG5”; transcript_id |
| | | | | | “MCS_NG5.1”; exon “1”; |
| chr4 | exon | 145131926 | 145132678 | − | gene_id “MCS_NG5”; transcript_id |
| | | | | | “MCS_NG5.1”; exon “2”; |
| chr4 | transcript | 145120948 | 145132678 | − | gene_id “MCS_NG5”; transcript_id |
| | | | | | “MCS_NG5.2”; RPKM “0.6430”; cov |
| | | | | | “13.4695”; |
| chr4 | exon | 145120948 | 145123131 | − | gene_id “MCS_NG5”; transcript_id |
| | | | | | “MCS_NG5.2”; exon “1”; |
| chr4 | exon | 145127174 | 145127334 | − | gene_id “MCS_NG5”; transcript_id |
| | | | | | “MCS_NG5.2”; exon “2”; |
| chr4 | exon | 145131926 | 145132678 | − | gene_id “MCS_NG5”; transcript_id |
| | | | | | “MCS_NG5.2”; exon “3”; |
| chr4 | transcript | 145120948 | 145430613 | − | gene_id “MCS_NG5”; transcript_id |
| | | | | | “MCS_NG5.3”; RPKM “1.1879”; cov |
| | | | | | “24.8835”; |
| chr4 | exon | 145120948 | 145123131 | − | gene_id “MCS_NG5”; transcript_id |
| | | | | | “MCS_NG5.3”; exon “1”; |
| chr4 | exon | 145127174 | 145127334 | − | gene_id “MCS_NG5”; transcript_id |
| | | | | | “MCS_NG5.3”; exon “2”; |
| chr4 | exon | 145131926 | 145132166 | − | gene_id “MCS_NG5”; transcript_id |
| | | | | | “MCS_NG5.3”; exon “3”; |
| chr4 | exon | 145137246 | 145137327 | − | gene_id “MCS_NG5”; transcript_id |
| | | | | | “MCS_NG5.3”; exon “4”; |
| chr4 | exon | 145141856 | 145141925 | − | gene_id “MCS_NG5”; transcript_id |
| | | | | | “MCS_NG5.3”; exon “5”; |
| chr4 | exon | 145204248 | 145204339 | − | gene_id “MCS_NG5”; transcript_id |
| | | | | | “MCS_NG5.3”; exon “6”; |
| chr4 | exon | 145337055 | 145337130 | − | gene_id “MCS_NG5”; transcript_id |
| | | | | | “MCS_NG5.3”; exon “7”; |
| chr4 | exon | 145430393 | 145430613 | − | gene_id “MCS_NG5”; transcript_id |
| | | | | | “MCS_NG5.3”; exon “8”; |
| chr4 | transcript | 145120948 | 145430613 | − | gene_id “MCS_NG5”; transcript_id |
| | | | | | “MCS_NG5.4”; RPKM “0.5472”; cov |
| | | | | | “11.4633”; |
| chr4 | exon | 145120948 | 145123131 | − | gene_id “MCS_NG5”; transcript_id |
| | | | | | “MCS_NG5.4”; exon “1”; |
| chr4 | exon | 145127174 | 145127334 | − | gene_id “MCS_NG5”; transcript_id |
| | | | | | “MCS_NG5.4”; exon “2”; |
| chr4 | exon | 145131926 | 145132166 | − | gene_id “MCS_NG5”; transcript_id |
| | | | | | “MCS_NG5.4”; exon “3”; |
| chr4 | exon | 145137246 | 145137327 | − | gene_id “MCS_NG5”; transcript_id |
| | | | | | “MCS_NG5.4”; exon “4”; |
| chr4 | exon | 145141856 | 145141925 | − | gene_id “MCS_NG5”; transcript_id |
| | | | | | “MCS_NG5.4”; exon “5”; |
| chr4 | exon | 145204248 | 145204339 | − | gene_id “MCS_NG5”; transcript_id |
| | | | | | “MCS_NG5.4”; exon “6”; |
| chr4 | exon | 145337055 | 145337130 | − | gene_id “MCS_NG5”; transcript_id |
| | | | | | “MCS_NG5.4”; exon “7”; |
| chr4 | exon | 145420599 | 145420672 | − | gene_id “MCS_NG5”; transcript_id |
| | | | | | “MCS_NG5.4”; exon “8”; |
| chr4 | exon | 145430393 | 145430613 | − | gene_id “MCS_NG5”; transcript_id |
| | | | | | “MCS_NG5.4”; exon “9”; |
| chr4 | transcript | 145120948 | 145430613 | − | gene_id “MCS_NG5”; transcript_id |
| | | | | | “MCS_NG5.5”; RPKM “1.4518”; cov |
| | | | | | “30.4127”; |
| chr4 | exon | 145120948 | 145123131 | − | gene_id “MCS_NG5”; transcript_id |
| | | | | | “MCS_NG5.5”; exon “1”; |
| chr4 | exon | 145131926 | 145132166 | − | gene_id “MCS_NG5”; transcript_id |
| | | | | | “MCS_NG5.5”; exon “2”; |
| chr4 | exon | 145137246 | 145137327 | − | gene_id “MCS_NG5”; transcript_id |
| | | | | | “MCS_NG5.5”; exon “3”; |
| chr4 | exon | 145141856 | 145141925 | − | gene_id “MCS_NG5”; transcript_id |
| | | | | | “MCS_NG5.5”; exon “4”; |
| chr4 | exon | 145204248 | 145204339 | − | gene_id “MCS_NG5”; transcript_id |
| | | | | | “MCS_NG5.5”; exon “5”; |
| chr4 | exon | 145337055 | 145337130 | − | gene_id “MCS_NG5”; transcript_id |
| | | | | | “MCS_NG5.5”; exon “6”; |
| chr4 | exon | 145430393 | 145430613 | − | gene_id “MCS_NG5”; transcript_id |
| | | | | | “MCS_NG5.5”; exon “7”; |
| chr4 | transcript | 145120948 | 145430613 | − | gene_id “MCS_NG5”; transcript_id |
| | | | | | “MCS_NG5.6”; RPKM “0.6165”; cov |
| | | | | | “12.9149”; |
| chr4 | exon | 145120948 | 145123131 | − | gene_id “MCS_NG5”; transcript_id |
| | | | | | “MCS_NG5.6”; exon “1”; |
| chr4 | exon | 145131926 | 145132166 | − | gene_id “MCS_NG5”; transcript_id |
| | | | | | “MCS_NG5.6”; exon “2”; |
| chr4 | exon | 145137246 | 145137327 | − | gene_id “MCS_NG5”; transcript_id |
| | | | | | “MCS_NG5.6”; exon “3”; |
| chr4 | exon | 145141856 | 145141925 | − | gene_id “MCS_NG5”; transcript_id |
| | | | | | “MCS_NG5.6”; exon “4”; |
| chr4 | exon | 145204248 | 145204339 | − | gene_id “MCS_NG5”; transcript_id |
| | | | | | “MCS_NG5.6”; exon “5”; |
| chr4 | exon | 145337055 | 145337130 | − | gene_id “MCS_NG5”; transcript_id |
| | | | | | “MCS_NG5.6”; exon “6”; |
| chr4 | exon | 145420581 | 145420672 | − | gene_id “MCS_NG5”; transcript_id |
| | | | | | “MCS_NG5.6”; exon “7”; |
| chr4 | exon | 145430393 | 145430613 | − | gene_id “MCS_NG5”; transcript_id |
| | | | | | “MCS_NG5.6”; exon “8”; |
| chr4 | transcript | 145120948 | 145430613 | − | gene_id “MCS_NG5”; transcript_id |
| | | | | | “MCS_NG5.7”; RPKM “0.6688”; cov |
| | | | | | “14.0105”; |
| chr4 | exon | 145120948 | 145123131 | − | gene_id “MCS_NG5”; transcript_id |
| | | | | | “MCS_NG5.7”; exon “1”; |
| chr4 | exon | 145131926 | 145132166 | − | gene_id “MCS_NG5”; transcript_id |
| | | | | | “MCS_NG5.7”; exon “2”; |
| chr4 | exon | 145137246 | 145137327 | − | gene_id “MCS_NG5”; transcript_id |
| | | | | | “MCS_NG5.7”; exon “3”; |
| chr4 | exon | 145141856 | 145141925 | − | gene_id “MCS_NG5”; transcript_id |
| | | | | | “MCS_NG5.7”; exon “4”; |
| chr4 | exon | 145204248 | 145204339 | − | gene_id “MCS_NG5”; transcript_id |
| | | | | | “MCS_NG5.7”; exon “5”; |
| chr4 | exon | 145337055 | 145337130 | − | gene_id “MCS_NG5”; transcript_id |
| | | | | | “MCS_NG5.7”; exon “6”; |
| chr4 | exon | 145420599 | 145420672 | − | gene_id “MCS_NG5”; transcript_id |
| | | | | | “MCS_NG5.7”; exon “7”; |
| chr4 | exon | 145430393 | 145430613 | − | gene_id “MCS_NG5”; transcript_id |
| | | | | | “MCS_NG5.7”; exon “8”; |
| chr7 | transcript | 25627460 | 25627927 | − | gene_id “MCS_NG6”; transcript_id |
| | | | | | “MCS_NG6.1”; RPKM “2.8060”; cov |
| | | | | | “58.7799”; |
| chr7 | exon | 25627460 | 25627927 | − | gene_id “MCS_NG6”; transcript_id |
| | | | | | “MCS_NG6.1”; exon “1”; |
| chr9 | transcript | 98278808 | 98280219 | + | gene_id “MCS_NG7”; transcript_id |
| | | | | | “MCS_NG7.1”; RPKM “1.3822”; cov |
| | | | | | “28.9533”; |
| chr9 | exon | 98278808 | 98280219 | + | gene_id “MCS_NG7”; transcript_id |
| | | | | | “MCS_NG7.1”; exon “1”; |
| chr1 | transcript | 81733802 | 81740717 | − | gene_id “Midline_NG1”; transcript_id |
| | | | | | “Midline_NG1.1”; RPKM “3.4068”; cov |
| | | | | | “59.0412”; |
| chr1 | exon | 81733802 | 81740717 | − | gene_id “Midline_NG1”; transcript_id |
| | | | | | “Midline_NG1.1”; exon “1”; |
| chr1 | transcript | 81742914 | 81772404 | − | gene_id “Midline_NG1”; transcript_id |
| | | | | | “Midline_NG1.5”; RPKM “0.9581”; cov |
| | | | | | “16.6047”; |
| chr1 | exon | 81742914 | 81743799 | − | gene_id “Midline_NG1”; transcript_id |
| | | | | | “Midline_NG1.5”; exon “1”; |
| chr1 | exon | 81744759 | 81744956 | − | gene_id “Midline_NG1”; transcript_id |
| | | | | | “Midline_NG1.5”; exon “2”; |
| chr1 | exon | 81764288 | 81764443 | − | gene_id “Midline_NG1”; transcript_id |
| | | | | | “Midline_NG1.5”; exon “3”; |
| chr1 | exon | 81766365 | 81766583 | − | gene_id “Midline_NG1”; transcript_id |
| | | | | | “Midline_NG1.5”; exon “4”; |
| chr1 | exon | 81772176 | 81772404 | − | gene_id “Midline_NG1”; transcript_id |
| | | | | | “Midline_NG1.5”; exon “5”; |
| chr1 | transcript | 81742914 | 81772404 | − | gene_id “Midline_NG1”; transcript_id |
| | | | | | “Midline_NG1.6”; RPKM “0.6033”; cov |
| | | | | | “10.4558”; |
| chr1 | exon | 81742914 | 81743799 | − | gene_id “Midline_NG1”; transcript_id |
| | | | | | “Midline_NG1.6”; exon “1”; |
| chr1 | exon | 81744759 | 81744956 | − | gene_id “Midline_NG1”; transcript_id |
| | | | | | “Midline_NG1.6”; exon “2”; |
| chr1 | exon | 81764288 | 81764443 | − | gene_id “Midline_NG1”; transcript_id |
| | | | | | “Midline_NG1.6”; exon “3”; |
| chr1 | exon | 81765321 | 81765443 | − | gene_id “Midline_NG1”; transcript_id |
| | | | | | “Midline_NG1.6”; exon “4”; |
| chr1 | exon | 81766365 | 81766583 | − | gene_id “Midline_NG1”; transcript_id |
| | | | | | “Midline_NG1.6”; exon “5”; |
| chr1 | exon | 81772176 | 81772404 | − | gene_id “Midline_NG1”; transcript_id |
| | | | | | “Midline_NG1.6”; exon “6”; |
| chr1 | transcript | 81753786 | 81772404 | − | gene_id “Midline_NG1”; transcript_id |
| | | | | | “Midline_NG1.3”; RPKM “0.6470”; cov |
| | | | | | “11.2125”; |
| chr1 | exon | 81753786 | 81764443 | − | gene_id “Midline_NG1”; transcript_id |
| | | | | | “Midline_NG1.3”; exon “1”; |
| chr1 | exon | 81765321 | 81765443 | − | gene_id “Midline_NG1”; transcript_id |
| | | | | | “Midline_NG1.3”; exon “2”; |
| chr1 | exon | 81766089 | 81766583 | − | gene_id “Midline_NG1”; transcript_id |
| | | | | | “Midline_NG1.3”; exon “3”; |
| chr1 | exon | 81772176 | 81772404 | − | gene_id “Midline_NG1”; transcript_id |
| | | | | | “Midline_NG1.3”; exon “4”; |
| chr1 | transcript | 81762332 | 81772404 | − | gene_id “Midline_NG1”; transcript_id |
| | | | | | “Midline_NG1.4”; RPKM “1.2253”; cov |
| | | | | | “21.2346”; |
| chr1 | exon | 81762332 | 81764443 | − | gene_id “Midline_NG1”; transcript_id |
| | | | | | “Midline_NG1.4”; exon “1”; |
| chr1 | exon | 81765321 | 81766583 | − | gene_id “Midline_NG1”; transcript_id |
| | | | | | “Midline_NG1.4”; exon “2”; |
| chr1 | exon | 81772176 | 81772404 | − | gene_id “Midline_NG1”; transcript_id |
| | | | | | “Midline_NG1.4”; exon “3”; |
| chr1 | transcript | 81764518 | 81772404 | − | gene_id “Midline_NG1”; transcript_id |
| | | | | | “Midline_NG1.2”; RPKM “0.7967”; cov |
| | | | | | “13.8066”; |
| chr1 | exon | 81764518 | 81766583 | − | gene_id “Midline_NG1”; transcript_id |
| | | | | | “Midline_NG1.2”; exon “1”; |
| chr1 | exon | 81772176 | 81772404 | − | gene_id “Midline_NG1”; transcript_id |
| | | | | | “Midline_NG1.2”; exon “2”; |
| chr13 | transcript | 86001004 | 86111279 | − | gene_id “Midline_NG26”; transcript_id |
| | | | | | “Midline_NG26.1”; RPKM “1.2608”; cov |
| | | | | | “21.8503”; |
| chr13 | exon | 86001004 | 86003874 | − | gene_id “Midline_NG26”; transcript_id |
| | | | | | “Midline_NG26.1”; exon “1”; |
| chr13 | exon | 86042621 | 86042759 | − | gene_id “Midline_NG26”; transcript_id |
| | | | | | “Midline_NG26.1”; exon “2”; |
| chr13 | exon | 86065671 | 86065859 | − | gene_id “Midline_NG26”; transcript_id |
| | | | | | “Midline_NG26.1”; exon “3”; |
| chr13 | exon | 86105572 | 86105658 | − | gene_id “Midline_NG26”; transcript_id |
| | | | | | “Midline_NG26.1”; exon “4”; |
| chr13 | exon | 86111176 | 86111279 | − | gene_id “Midline_NG26”; transcript_id |
| | | | | | “Midline_NG26.1”; exon “5”; |
| chr13 | transcript | 86001004 | 86111279 | − | gene_id “Midline_NG26”; transcript_id |
| | | | | | “Midline_NG26.2”; RPKM “0.6895”; cov |
| | | | | | “11.9486”; |
| chr13 | exon | 86001004 | 86003874 | − | gene_id “Midline_NG26”; transcript_id |
| | | | | | “Midline_NG26.2”; exon “1”; |
| chr13 | exon | 86042621 | 86042759 | − | gene_id “Midline_NG26”; transcript_id |
| | | | | | “Midline_NG26.2”; exon “2”; |
| chr13 | exon | 86065671 | 86065859 | − | gene_id “Midline_NG26”; transcript_id |
| | | | | | “Midline_NG26.2”; exon “3”; |
| chr13 | exon | 86103939 | 86104013 | − | gene_id “Midline_NG26”; transcript_id |
| | | | | | “Midline_NG26.2”; exon “4”; |
| chr13 | exon | 86105572 | 86105658 | − | gene_id “Midline_NG26”; transcript_id |
| | | | | | “Midline_NG26.2”; exon “5”; |
| chr13 | exon | 86111176 | 86111279 | − | gene_id “Midline_NG26”; transcript_id |
| | | | | | “Midline_NG26.2”; exon “6”; |
| chr13 | transcript | 86240716 | 86357493 | + | gene_id “Midline_NG27”; transcript_id |
| | | | | | “Midline_NG27.1”; RPKM “0.6024”; cov |
| | | | | | “10.4401”; |
| chr13 | exon | 86240716 | 86240895 | + | gene_id “Midline_NG27”; transcript_id |
| | | | | | “Midline_NG27.1”; exon “1”; |
| chr13 | exon | 86250665 | 86250748 | + | gene_id “Midline_NG27”; transcript_id |
| | | | | | “Midline_NG27.1”; exon “2”; |
| chr13 | exon | 86270269 | 86270364 | + | gene_id “Midline_NG27”; transcript_id |
| | | | | | “Midline_NG27.1”; exon “3”; |
| chr13 | exon | 86312972 | 86313040 | + | gene_id “Midline_NG27”; transcript_id |
| | | | | | “Midline_NG27.1”; exon “4”; |
| chr13 | exon | 86353687 | 86353776 | + | gene_id “Midline_NG27”; transcript_id |
| | | | | | “Midline_NG27.1”; exon “5”; |
| chr13 | exon | 86354607 | 86354649 | + | gene_id “Midline_NG27”; transcript_id |
| | | | | | “Midline_NG27.1”; exon “6”; |
| chr13 | exon | 86357201 | 86357493 | + | gene_id “Midline_NG27”; transcript_id |
| | | | | | “Midline_NG27.1”; exon “7”; |
| chr13 | transcript | 86240716 | 86349201 | + | gene_id “Midline_NG27”; transcript_id |
| | | | | | “Midline_NG27.2”; RPKM “3.6059”; cov |
| | | | | | “62.4921”; |
| chr13 | exon | 86240716 | 86240895 | + | gene_id “Midline_NG27”; transcript_id |
| | | | | | “Midline_NG27.2”; exon “1”; |
| chr13 | exon | 86250665 | 86250748 | + | gene_id “Midline_NG27”; transcript_id |
| | | | | | “Midline_NG27.2”; exon “2”; |
| chr13 | exon | 86270269 | 86270364 | + | gene_id “Midline_NG27”; transcript_id |
| | | | | | “Midline_NG27.2”; exon “3”; |
| chr13 | exon | 86312972 | 86313040 | + | gene_id “Midline_NG27”; transcript_id |
| | | | | | “Midline_NG27.2”; exon “4”; |
| chr13 | exon | 86348403 | 86349201 | + | gene_id “Midline_NG27”; transcript_id |
| | | | | | “Midline_NG27.2”; exon “5”; |
| chr13 | transcript | 86240716 | 86615294 | + | gene_id “Midline_NG27”; transcript_id |
| | | | | | “Midline_NG27.3”; RPKM “0.6617”; cov |
| | | | | | “11.4672”; |
| chr13 | exon | 86240716 | 86240895 | + | gene_id “Midline_NG27”; transcript_id |
| | | | | | “Midline_NG27.3”; exon “1”; |
| chr13 | exon | 86250665 | 86250748 | + | gene_id “Midline_NG27”; transcript_id |
| | | | | | “Midline_NG27.3”; exon “2”; |
| chr13 | exon | 86270269 | 86270364 | + | gene_id “Midline_NG27”; transcript_id |
| | | | | | “Midline_NG27.3”; exon “3”; |
| chr13 | exon | 86312972 | 86313040 | + | gene_id “Midline_NG27”; transcript_id |
| | | | | | “Midline_NG27.3”; exon “4”; |
| chr13 | exon | 86610794 | 86615294 | + | gene_id “Midline_NG27”; transcript_id |
| | | | | | “Midline_NG27.3”; exon “5”; |
| chr13 | transcript | 86310504 | 86314041 | + | gene_id “Midline_NG27”; transcript_id |
| | | | | | “Midline_NG27.4”; RPKM “1.6177”; cov |
| | | | | | “28.0357”; |
| chr13 | exon | 86310504 | 86314041 | + | gene_id “Midline_NG27”; transcript_id |
| | | | | | “Midline_NG27.4”; exon “1”; |
| chr17_gl000205_random | transcript | 6725 | 14470 | + | gene_id “Midline_NG29”; transcript_id |
| | | | | | “Midline_NG29.1”; RPKM “0.6211”; cov |
| | | | | | “10.7632”; |
| chr17_gl000205_random | exon | 6725 | 7257 | + | gene_id “Midline_NG29”; transcript_id |
| | | | | | “Midline_NG29.1”; exon “1”; |
| chr17_gl000205_random | exon | 10851 | 14470 | + | gene_id “Midline_NG29”; transcript_id |
| | | | | | “Midline_NG29.1”; exon “2”; |
| chr2 | transcript | 57436798 | 57442143 | − | gene_id “Midline_NG2”; transcript_id |
| | | | | | “Midline_NG2.1”; RPKM “3.0087”; cov |
| | | | | | “52.1431”; |
| chr2 | exon | 57436798 | 57442143 | − | gene_id “Midline_NG2”; transcript_id |
| | | | | | “Midline_NG2.1”; exon “1”; |
| chr2 | transcript | 59063403 | 59091410 | − | gene_id “Midline_NG3”; transcript_id |
| | | | | | “Midline_NG3.1”; RPKM “2.9486”; cov |
| | | | | | “51.1015”; |
| chr2 | exon | 59063403 | 59065418 | − | gene_id “Midline_NG3”; transcript_id |
| | | | | | “Midline_NG3.1”; exon “1”; |
| chr2 | exon | 59069232 | 59069283 | − | gene_id “Midline_NG3”; transcript_id |
| | | | | | “Midline_NG3.1”; exon “2”; |
| chr2 | exon | 59091060 | 59091410 | − | gene_id “Midline_NG3”; transcript_id |
| | | | | | “Midline_NG3.1”; exon “3”; |
| chr2 | transcript | 59063403 | 59091410 | − | gene_id “Midline_NG3”; transcript_id |
| | | | | | “Midline_NG3.2”; RPKM “1.9007”; cov |
| | | | | | “32.9400”; |
| chr2 | exon | 59063403 | 59065418 | − | gene_id “Midline_NG3”; transcript_id |
| | | | | | “Midline_NG3.2”; exon “1”; |
| chr2 | exon | 59069232 | 59069283 | − | gene_id “Midline_NG3”; transcript_id |
| | | | | | “Midline_NG3.2”; exon “2”; |
| chr2 | exon | 59076762 | 59077439 | − | gene_id “Midline_NG3”; transcript_id |
| | | | | | “Midline_NG3.2”; exon “3”; |
| chr2 | exon | 59091060 | 59091410 | − | gene_id “Midline_NG3”; transcript_id |
| | | | | | “Midline_NG3.2”; exon “4”; |
| chr2 | transcript | 59063403 | 59091410 | − | gene_id “Midline_NG3”; transcript_id |
| | | | | | “Midline_NG3.3”; RPKM “0.9661”; cov |
| | | | | | “16.7422”; |
| chr2 | exon | 59063403 | 59065418 | − | gene_id “Midline_NG3”; transcript_id |
| | | | | | “Midline_NG3.3”; exon “1”; |
| chr2 | exon | 59069232 | 59069283 | − | gene_id “Midline_NG3”; transcript_id |
| | | | | | “Midline_NG3.3”; exon “2”; |
| chr2 | exon | 59076762 | 59077439 | − | gene_id “Midline_NG3”; transcript_id |
| | | | | | “Midline_NG3.3”; exon “3”; |
| chr2 | exon | 59090231 | 59091410 | − | gene_id “Midline_NG3”; transcript_id |
| | | | | | “Midline_NG3.3”; exon “4”; |
| chr2 | transcript | 60781021 | 60783180 | + | gene_id “Midline_NG4”; transcript_id |
| | | | | | “Midline_NG4.1”; RPKM “3.1323”; cov |
| | | | | | “54.2843”; |
| chr2 | exon | 60781021 | 60783180 | + | gene_id “Midline_NG4”; transcript_id |
| | | | | | “Midline_NG4.1”; exon “1”; |
| chr2 | transcript | 60783193 | 60784227 | + | gene_id “Midline_NG5”; transcript_id |
| | | | | | “Midline_NG5.1”; RPKM “1.9665”; cov |
| | | | | | “34.0812”; |
| chr2 | exon | 60783193 | 60784227 | + | gene_id “Midline_NG5”; transcript_id |
| | | | | | “Midline_NG5.1”; exon “1”; |
| chr2 | transcript | 117511281 | 117536452 | + | gene_id “Midline_NG6”; transcript_id |
| | | | | | “Midline_NG6.2”; RPKM “0.8703”; cov |
| | | | | | “15.0835”; |
| chr2 | exon | 117511281 | 117511916 | + | gene_id “Midline_NG6”; transcript_id |
| | | | | | “Midline_NG6.2”; exon “1”; |
| chr2 | exon | 117528080 | 117528151 | + | gene_id “Midline_NG6”; transcript_id |
| | | | | | “Midline_NG6.2”; exon “2”; |
| chr2 | exon | 117531621 | 117536452 | + | gene_id “Midline_NG6”; transcript_id |
| | | | | | “Midline_NG6.2”; exon “3”; |
| chr2 | transcript | 117511281 | 117568649 | + | gene_id “Midline_NG6”; transcript_id |
| | | | | | “Midline_NG6.3”; RPKM “0.7225”; cov |
| | | | | | “12.5214”; |
| chr2 | exon | 117511281 | 117511916 | + | gene_id “Midline_NG6”; transcript_id |
| | | | | | “Midline_NG6.3”; exon “1”; |
| chr2 | exon | 117528080 | 117528151 | + | gene_id “Midline_NG6”; transcript_id |
| | | | | | “Midline_NG6.3”; exon “2”; |
| chr2 | exon | 117566452 | 117566494 | + | gene_id “Midline_NG6”; transcript_id |
| | | | | | “Midline_NG6.3”; exon “3”; |
| chr2 | exon | 117568280 | 117568649 | + | gene_id “Midline_NG6”; transcript_id |
| | | | | | “Midline_NG6.3”; exon “4”; |
| chr2 | transcript | 117511281 | 117556188 | + | gene_id “Midline_NG6”; transcript_id |
| | | | | | “Midline_NG6.4”; RPKM “0.6393”; cov |
| | | | | | “11.0791”; |
| chr2 | exon | 117511281 | 117511916 | + | gene_id “Midline_NG6”; transcript_id |
| | | | | | “Midline_NG6.4”; exon “1”; |
| chr2 | exon | 117528080 | 117528151 | + | gene_id “Midline_NG6”; transcript_id |
| | | | | | “Midline_NG6.4”; exon “2”; |
| chr2 | exon | 117548537 | 117556188 | + | gene_id “Midline_NG6”; transcript_id |
| | | | | | “Midline_NG6.4”; exon “3”; |
| chr2 | transcript | 117544112 | 117556188 | + | gene_id “Midline_NG6”; transcript_id |
| | | | | | “Midline_NG6.1”; RPKM “1.8155”; cov |
| | | | | | “31.4633”; |
| chr2 | exon | 117544112 | 117556188 | + | gene_id “Midline_NG6”; transcript_id |
| | | | | | “Midline_NG6.1”; exon “1”; |
| chr3 | transcript | 172340093 | 172349793 | + | gene_id “Midline_NG7”; transcript_id |
| | | | | | “Midline_NG7.1”; RPKM “0.8464”; cov |
| | | | | | “14.6681”; |
| chr3 | exon | 172340093 | 172340226 | + | gene_id “Midline_NG7”; transcript_id |
| | | | | | “Midline_NG7.1”; exon “1”; |
| chr3 | exon | 172349186 | 172349793 | + | gene_id “Midline_NG7”; transcript_id |
| | | | | | “Midline_NG7.1”; exon “2”; |
| chr3 | transcript | 181943552 | 181954028 | − | gene_id “Midline_NG8”; transcript_id |
| | | | | | “Midline_NG8.1”; RPKM “0.6069”; cov |
| | | | | | “10.5179”; |
| chr3 | exon | 181943552 | 181944257 | − | gene_id “Midline_NG8”; transcript_id |
| | | | | | “Midline_NG8.1”; exon “1”; |
| chr3 | exon | 181947388 | 181947459 | − | gene_id “Midline_NG8”; transcript_id |
| | | | | | “Midline_NG8.1”; exon “2”; |
| chr3 | exon | 181950019 | 181950090 | − | gene_id “Midline_NG8”; transcript_id |
| | | | | | “Midline_NG8.1”; exon “3”; |
| chr3 | exon | 181951884 | 181954028 | − | gene_id “Midline_NG8”; transcript_id |
| | | | | | “Midline_NG8.1”; exon “4”; |
| chr3 | transcript | 181981092 | 181984367 | + | gene_id “Midline_NG9”; transcript_id |
| | | | | | “Midline_NG9.1”; RPKM “3.7999”; cov |
| | | | | | “65.8538”; |
| chr3 | exon | 181981092 | 181984367 | + | gene_id “Midline_NG9”; transcript_id |
| | | | | | “Midline_NG9.1”; exon “1”; |
| chr3 | transcript | 182296463 | 182410116 | − | gene_id “Midline_NG10”; transcript_id |
| | | | | | “Midline_NG10.4”; RPKM “1.4826”; cov |
| | | | | | “25.6944”; |
| chr3 | exon | 182296463 | 182297846 | − | gene_id “Midline_NG10”; transcript_id |
| | | | | | “Midline_NG10.4”; exon “1”; |
| chr3 | exon | 182335300 | 182335385 | − | gene_id “Midline_NG10”; transcript_id |
| | | | | | “Midline_NG10.4”; exon “2”; |
| chr3 | exon | 182338171 | 182338412 | − | gene_id “Midline_NG10”; transcript_id |
| | | | | | “Midline_NG10.4”; exon “3”; |
| chr3 | exon | 182406874 | 182406991 | − | gene_id “Midline_NG10”; transcript_id |
| | | | | | “Midline_NG10.4”; exon “4”; |
| chr3 | exon | 182409868 | 182410116 | − | gene_id “Midline_NG10”; transcript_id |
| | | | | | “Midline_NG10.4”; exon “5”; |
| chr3 | transcript | 182402789 | 182410116 | − | gene_id “Midline_NG10”; transcript_id |
| | | | | | “Midline_NG10.2”; RPKM “1.1113”; cov |
| | | | | | “19.2601”; |
| chr3 | exon | 182402789 | 182406991 | − | gene_id “Midline_NG10”; transcript_id |
| | | | | | “Midline_NG10.2”; exon “1”; |
| chr3 | exon | 182409868 | 182410116 | − | gene_id “Midline_NG10”; transcript_id |
| | | | | | “Midline_NG10.2”; exon “2”; |
| chr3 | transcript | 182410454 | 182415565 | − | gene_id “Midline_NG10”; transcript_id |
| | | | | | “Midline_NG10.3”; RPKM “3.7889”; cov |
| | | | | | “65.6631”; |
| chr3 | exon | 182410454 | 182411045 | − | gene_id “Midline_NG10”; transcript_id |
| | | | | | “Midline_NG10.3”; exon “1”; |
| chr3 | exon | 182414828 | 182414948 | − | gene_id “Midline_NG10”; transcript_id |
| | | | | | “Midline_NG10.3”; exon “2”; |
| chr3 | exon | 182415159 | 182415565 | − | gene_id “Midline_NG10”; transcript_id |
| | | | | | “Midline_NG10.3”; exon “3”; |
| chr3 | transcript | 182410454 | 182412434 | − | gene_id “Midline_NG10”; transcript_id |
| | | | | | “Midline_NG10.1”; RPKM “1.6169”; cov |
| | | | | | “28.0225”; |
| chr3 | exon | 182410454 | 182412434 | − | gene_id “Midline_NG10”; transcript_id |
| | | | | | “Midline_NG10.1”; exon “1”; |
| chr3 | transcript | 182281415 | 182288803 | − | gene_id “Midline_NG11”; transcript_id |
| | | | | | “Midline_NG11.1”; RPKM “3.1229”; cov |
| | | | | | “54.1210”; |
| chr3 | exon | 182281415 | 182288803 | − | gene_id “Midline_NG11”; transcript_id |
| | | | | | “Midline_NG11.1”; exon “1”; |
| chr3 | transcript | 182421165 | 182503431 | + | gene_id “Midline_NG12”; transcript_id |
| | | | | | “Midline_NG12.3”; RPKM “0.8552”; cov |
| | | | | | “14.8209”; |
| chr3 | exon | 182421165 | 182421493 | + | gene_id “Midline_NG12”; transcript_id |
| | | | | | “Midline_NG12.3”; exon “1”; |
| chr3 | exon | 182499690 | 182499807 | + | gene_id “Midline_NG12”; transcript_id |
| | | | | | “Midline_NG12.3”; exon “2”; |
| chr3 | exon | 182502139 | 182503431 | + | gene_id “Midline_NG12”; transcript_id |
| | | | | | “Midline_NG12.3”; exon “3”; |
| chr3 | transcript | 182421165 | 182503431 | + | gene_id “Midline_NG12”; transcript_id |
| | | | | | “Midline_NG12.2”; RPKM “1.4405”; cov |
| | | | | | “24.9639”; |
| chr3 | exon | 182421165 | 182421493 | + | gene_id “Midline_NG12”; transcript_id |
| | | | | | “Midline_NG12.2”; exon “1”; |
| chr3 | exon | 182499690 | 182499807 | + | gene_id “Midline_NG12”; transcript_id |
| | | | | | “Midline_NG12.2”; exon “2”; |
| chr3 | exon | 182501056 | 182501148 | + | gene_id “Midline_NG12”; transcript_id |
| | | | | | “Midline_NG12.2”; exon “3”; |
| chr3 | exon | 182502139 | 182503431 | + | gene_id “Midline_NG12”; transcript_id |
| | | | | | “Midline_NG12.2”; exon “4”; |
| chr3 | transcript | 182421165 | 182473642 | + | gene_id “Midline_NG12”; transcript_id |
| | | | | | “Midline_NG12.1”; RPKM “1.2159”; cov |
| | | | | | “21.0714”; |
| chr3 | exon | 182421165 | 182421493 | + | gene_id “Midline_NG12”; transcript_id |
| | | | | | “Midline_NG12.1”; exon “1”; |
| chr3 | exon | 182469939 | 182472111 | + | gene_id “Midline_NG12”; transcript_id |
| | | | | | “Midline_NG12.1”; exon “2”; |
| chr3 | exon | 182472132 | 182473642 | + | gene_id “Midline_NG12”; transcript_id |
| | | | | | “Midline_NG12.1”; exon “3”; |
| chr4 | transcript | 74531148 | 74553199 | − | gene_id “Midline_NG13”; transcript_id |
| | | | | | “Midline_NG13.1”; RPKM “0.9354”; cov |
| | | | | | “16.2116”; |
| chr4 | exon | 74531148 | 74536640 | − | gene_id “Midline_NG13”; transcript_id |
| | | | | | “Midline_NG13.1”; exon “1”; |
| chr4 | exon | 74552851 | 74553199 | − | gene_id “Midline_NG13”; transcript_id |
| | | | | | “Midline_NG13.1”; exon “2”; |
| chr4 | transcript | 74531148 | 74553199 | − | gene_id “Midline_NG13”; transcript_id |
| | | | | | “Midline_NG13.2”; RPKM “1.2050”; cov |
| | | | | | “20.8835”; |
| chr4 | exon | 74531148 | 74532256 | − | gene_id “Midline_NG13”; transcript_id |
| | | | | | “Midline_NG13.2”; exon “1”; |
| chr4 | exon | 74536467 | 74536640 | − | gene_id “Midline_NG13”; transcript_id |
| | | | | | “Midline_NG13.2”; exon “2”; |
| chr4 | exon | 74552851 | 74553199 | − | gene_id “Midline_NG13”; transcript_id |
| | | | | | “Midline_NG13.2”; exon “3”; |
| chr4 | transcript | 74746644 | 74754291 | + | gene_id “Midline_NG14”; transcript_id |
| | | | | | “Midline_NG14.2”; RPKM “1.1574”; cov |
| | | | | | “20.0575”; |
| chr4 | exon | 74746644 | 74746813 | + | gene_id “Midline_NG14”; transcript_id |
| | | | | | “Midline_NG14.2”; exon “1”; |
| chr4 | exon | 74747504 | 74747631 | + | gene_id “Midline_NG14”; transcript_id |
| | | | | | “Midline_NG14.2”; exon “2”; |
| chr4 | exon | 74753866 | 74754291 | + | gene_id “Midline_NG14”; transcript_id |
| | | | | | “Midline_NG14.2”; exon “3”; |
| chr4 | transcript | 74746644 | 74749249 | + | gene_id “Midline_NG14”; transcript_id |
| | | | | | “Midline_NG14.3”; RPKM “1.5361”; cov |
| | | | | | “26.6207”; |
| chr4 | exon | 74746644 | 74746813 | + | gene_id “Midline_NG14”; transcript_id |
| | | | | | “Midline_NG14.3”; exon “1”; |
| chr4 | exon | 74747504 | 74747631 | + | gene_id “Midline_NG14”; transcript_id |
| | | | | | “Midline_NG14.3”; exon “2”; |
| chr4 | exon | 74748469 | 74749249 | + | gene_id “Midline_NG14”; transcript_id |
| | | | | | “Midline_NG14.3”; exon “3”; |
| chr4 | transcript | 74751694 | 74754291 | + | gene_id “Midline_NG14”; transcript_id |
| | | | | | “Midline_NG14.1”; RPKM “1.1381”; cov |
| | | | | | “19.7246”; |
| chr4 | exon | 74751694 | 74751921 | + | gene_id “Midline_NG14”; transcript_id |
| | | | | | “Midline_NG14.1”; exon “1”; |
| chr4 | exon | 74753866 | 74754291 | + | gene_id “Midline_NG14”; transcript_id |
| | | | | | “Midline_NG14.1”; exon “2”; |
| chr5 | transcript | 82056215 | 82057217 | + | gene_id “Midline_NG15”; transcript_id |
| | | | | | “Midline_NG15.1”; RPKM “4.1334”; cov |
| | | | | | “71.6332”; |
| chr5 | exon | 82056215 | 82057217 | + | gene_id “Midline_NG15”; transcript_id |
| | | | | | “Midline_NG15.1”; exon “1”; |
| chr5 | transcript | 102908913 | 102909803 | + | gene_id “Midline_NG16”; transcript_id |
| | | | | | “Midline_NG16.1”; RPKM “1.1635”; cov |
| | | | | | “20.1642”; |
| chr5 | exon | 102908913 | 102909803 | + | gene_id “Midline_NG16”; transcript_id |
| | | | | | “Midline_NG16.1”; exon “1”; |
| chr5 | transcript | 103011592 | 103286410 | + | gene_id “Midline_NG16”; transcript_id |
| | | | | | “Midline_NG16.7”; RPKM “1.2463”; cov |
| | | | | | “21.5988”; |
| chr5 | exon | 103011592 | 103012133 | + | gene_id “Midline_NG16”; transcript_id |
| | | | | | “Midline_NG16.7”; exon “1”; |
| chr5 | exon | 103014213 | 103014267 | + | gene_id “Midline_NG16”; transcript_id |
| | | | | | “Midline_NG16.7”; exon “2”; |
| chr5 | exon | 103154863 | 103154935 | + | gene_id “Midline_NG16”; transcript_id |
| | | | | | “Midline_NG16.7”; exon “3”; |
| chr5 | exon | 103249096 | 103249187 | + | gene_id “Midline_NG16”; transcript_id |
| | | | | | “Midline_NG16.7”; exon “4”; |
| chr5 | exon | 103251007 | 103251132 | + | gene_id “Midline_NG16”; transcript_id |
| | | | | | “Midline_NG16.7”; exon “5”; |
| chr5 | exon | 103269266 | 103286410 | + | gene_id “Midline_NG16”; transcript_id |
| | | | | | “Midline_NG16.7”; exon “6”; |
| chr5 | transcript | 103011592 | 103286410 | + | gene_id “Midline_NG16”; transcript_id |
| | | | | | “Midline_NG16.6”; RPKM “1.2780”; cov |
| | | | | | “22.1488”; |
| chr5 | exon | 103011592 | 103012133 | + | gene_id “Midline_NG16”; transcript_id |
| | | | | | “Midline_NG16.6”; exon “1”; |
| chr5 | exon | 103014213 | 103014267 | + | gene_id “Midline_NG16”; transcript_id |
| | | | | | “Midline_NG16.6”; exon “2”; |
| chr5 | exon | 103154863 | 103154935 | + | gene_id “Midline_NG16”; transcript_id |
| | | | | | “Midline_NG16.6”; exon “3”; |
| chr5 | exon | 103249096 | 103249187 | + | gene_id “Midline_NG16”; transcript_id |
| | | | | | “Midline_NG16.6”; exon “4”; |
| chr5 | exon | 103269266 | 103286410 | + | gene_id “Midline_NG16”; transcript_id |
| | | | | | “Midline_NG16.6”; exon “5”; |
| chr5 | transcript | 103011592 | 103286410 | + | gene_id “Midline_NG16”; transcript_id |
| | | | | | “Midline_NG16.5”; RPKM “1.0633”; cov |
| | | | | | “18.4269”; |
| chr5 | exon | 103011592 | 103012133 | + | gene_id “Midline_NG16”; transcript_id |
| | | | | | “Midline_NG16.5”; exon “1”; |
| chr5 | exon | 103014213 | 103014267 | + | gene_id “Midline_NG16”; transcript_id |
| | | | | | “Midline_NG16.5”; exon “2”; |
| chr5 | exon | 103154863 | 103154935 | + | gene_id “Midline_NG16”; transcript_id |
| | | | | | “Midline_NG16.5”; exon “3”; |
| chr5 | exon | 103249096 | 103249187 | + | gene_id “Midline_NG16”; transcript_id |
| | | | | | “Midline_NG16.5”; exon “4”; |
| chr5 | exon | 103251007 | 103251132 | + | gene_id “Midline_NG16”; transcript_id |
| | | | | | “Midline_NG16.5”; exon “5”; |
| chr5 | exon | 103267968 | 103268119 | + | gene_id “Midline_NG16”; transcript_id |
| | | | | | “Midline_NG16.5”; exon “6”; |
| chr5 | exon | 103269266 | 103269673 | + | gene_id “Midline_NG16”; transcript_id |
| | | | | | “Midline_NG16.5”; exon “7”; |
| chr5 | exon | 103281981 | 103286410 | + | gene_id “Midline_NG16”; transcript_id |
| | | | | | “Midline_NG16.5”; exon “8”; |
| chr5 | transcript | 103011592 | 103286410 | + | gene_id “Midline_NG16”; transcript_id |
| | | | | | “Midline_NG16.4”; RPKM “1.4194”; cov |
| | | | | | “24.5985”; |
| chr5 | exon | 103011592 | 103012133 | + | gene_id “Midline_NG16”; transcript_id |
| | | | | | “Midline_NG16.4”; exon “1”; |
| chr5 | exon | 103014213 | 103014267 | + | gene_id “Midline_NG16”; transcript_id |
| | | | | | “Midline_NG16.4”; exon “2”; |
| chr5 | exon | 103154863 | 103154935 | + | gene_id “Midline_NG16”; transcript_id |
| | | | | | “Midline_NG16.4”; exon “3”; |
| chr5 | exon | 103249096 | 103249187 | + | gene_id “Midline_NG16”; transcript_id |
| | | | | | “Midline_NG16.4”; exon “4”; |
| chr5 | exon | 103251007 | 103251132 | + | gene_id “Midline_NG16”; transcript_id |
| | | | | | “Midline_NG16.4”; exon “5”; |
| chr5 | exon | 103266433 | 103266724 | + | gene_id “Midline_NG16”; transcript_id |
| | | | | | “Midline_NG16.4”; exon “6”; |
| chr5 | exon | 103267968 | 103268119 | + | gene_id “Midline_NG16”; transcript_id |
| | | | | | “Midline_NG16.4”; exon “7”; |
| chr5 | exon | 103269266 | 103269673 | + | gene_id “Midline_NG16”; transcript_id |
| | | | | | “Midline_NG16.4”; exon “8”; |
| chr5 | exon | 103281981 | 103286410 | + | gene_id “Midline_NG16”; transcript_id |
| | | | | | “Midline_NG16.4”; exon “9”; |
| chr5 | transcript | 103011592 | 103286410 | + | gene_id “Midline_NG16”; transcript_id |
| | | | | | “Midline_NG16.2”; RPKM “0.8690”; cov |
| | | | | | “15.0606”; |
| chr5 | exon | 103011592 | 103012133 | + | gene_id “Midline_NG16”; transcript_id |
| | | | | | “Midline_NG16.2”; exon “1”; |
| chr5 | exon | 103014213 | 103014267 | + | gene_id “Midline_NG16”; transcript_id |
| | | | | | “Midline_NG16.2”; exon “2”; |
| chr5 | exon | 103154863 | 103154935 | + | gene_id “Midline_NG16”; transcript_id |
| | | | | | “Midline_NG16.2”; exon “3”; |
| chr5 | exon | 103269266 | 103269673 | + | gene_id “Midline_NG16”; transcript_id |
| | | | | | “Midline_NG16.2”; exon “4”; |
| chr5 | exon | 103281981 | 103286410 | + | gene_id “Midline_NG16”; transcript_id |
| | | | | | “Midline_NG16.2”; exon “5”; |
| chr5 | transcript | 103264884 | 103286410 | + | gene_id “Midline_NG16”; transcript_id |
| | | | | | “Midline_NG16.3”; RPKM “0.6171”; cov |
| | | | | | “10.6942”; |
| chr5 | exon | 103264884 | 103266724 | + | gene_id “Midline_NG16”; transcript_id |
| | | | | | “Midline_NG16.3”; exon “1”; |
| chr5 | exon | 103267968 | 103268119 | + | gene_id “Midline_NG16”; transcript_id |
| | | | | | “Midline_NG16.3”; exon “2”; |
| chr5 | exon | 103269266 | 103269673 | + | gene_id “Midline_NG16”; transcript_id |
| | | | | | “Midline_NG16.3”; exon “3”; |
| chr5 | exon | 103281981 | 103286410 | + | gene_id “Midline_NG16”; transcript_id |
| | | | | | “Midline_NG16.3”; exon “4”; |
| chr5 | transcript | 103047381 | 103048443 | + | gene_id “Midline_NG17”; transcript_id |
| | | | | | “Midline_NG17.1”; RPKM “5.0516”; cov |
| | | | | | “87.5475”; |
| chr5 | exon | 103047381 | 103048443 | + | gene_id “Midline_NG17”; transcript_id |
| | | | | | “Midline_NG17.1”; exon “1”; |
| chr5 | transcript | 103090181 | 103092255 | + | gene_id “Midline_NG18”; transcript_id |
| | | | | | “Midline_NG18.1”; RPKM “3.5904”; cov |
| | | | | | “62.2231”; |
| chr5 | exon | 103090181 | 103092255 | + | gene_id “Midline_NG18”; transcript_id |
| | | | | | “Midline_NG18.1”; exon “1”; |
| chr5 | transcript | 103292001 | 103308839 | + | gene_id “Midline_NG19”; transcript_id |
| | | | | | “Midline_NG19.2”; RPKM “3.9691”; cov |
| | | | | | “68.7869”; |
| chr5 | exon | 103292001 | 103308839 | + | gene_id “Midline_NG19”; transcript_id |
| | | | | | “Midline_NG19.2”; exon “1”; |
| chr5 | transcript | 103324512 | 103335038 | + | gene_id “Midline_NG19”; transcript_id |
| | | | | | “Midline_NG19.1”; RPKM “2.6366”; cov |
| | | | | | “45.6942”; |
| chr5 | exon | 103324512 | 103335038 | + | gene_id “Midline_NG19”; transcript_id |
| | | | | | “Midline_NG19.1”; exon “1”; |
| chr5 | transcript | 103310277 | 103324457 | + | gene_id “Midline_NG20”; transcript_id |
| | | | | | “Midline_NG20.1”; RPKM “1.1678”; cov |
| | | | | | “20.2378”; |
| chr5 | exon | 103310277 | 103324457 | + | gene_id “Midline_NG20”; transcript_id |
| | | | | | “Midline_NG20.1”; exon “1”; |
| chr5 | transcript | 103335061 | 103337734 | + | gene_id “Midline_NG21”; transcript_id |
| | | | | | “Midline_NG21.1”; RPKM “3.7553”; cov |
| | | | | | “65.0819”; |
| chr5 | exon | 103335061 | 103337734 | + | gene_id “Midline_NG21”; transcript_id |
| | | | | | “Midline_NG21.1”; exon “1”; |
| chr6 | transcript | 93621815 | 93625011 | − | gene_id “Midline_NG22”; transcript_id |
| | | | | | “Midline_NG22.1”; RPKM “10.2269”; cov |
| | | | | | “177.2371”; |
| chr6 | exon | 93621815 | 93625011 | − | gene_id “Midline_NG22”; transcript_id |
| | | | | | “Midline_NG22.1”; exon “1”; |
| chr7 | transcript | 7755069 | 7768011 | + | gene_id “Midline_NG23”; transcript_id |
| | | | | | “Midline_NG23.3”; RPKM “5.6055”; cov |
| | | | | | “97.1468”; |
| chr7 | exon | 7755069 | 7768011 | + | gene_id “Midline_NG23”; transcript_id |
| | | | | | “Midline_NG23.3”; exon “1”; |
| chr7 | transcript | 7755069 | 7768011 | + | gene_id “Midline_NG23”; transcript_id |
| | | | | | “Midline_NG23.2”; RPKM “1.9633”; cov |
| | | | | | “34.0243”; |
| chr7 | exon | 7755069 | 7757168 | + | gene_id “Midline_NG23”; transcript_id |
| | | | | | “Midline_NG23.2”; exon “1”; |
| chr7 | exon | 7760544 | 7768011 | + | gene_id “Midline_NG23”; transcript_id |
| | | | | | “Midline_NG23.2”; exon “2”; |
| chr7 | transcript | 7755069 | 7768011 | + | gene_id “Midline_NG23”; transcript_id |
| | | | | | “Midline_NG23.1”; RPKM “12.3499”; cov |
| | | | | | “214.0304”; |
| chr7 | exon | 7755069 | 7757081 | + | gene_id “Midline_NG23”; transcript_id |
| | | | | | “Midline_NG23.1”; exon “1”; |
| chr7 | exon | 7760544 | 7768011 | + | gene_id “Midline_NG23”; transcript_id |
| | | | | | “Midline_NG23.1”; exon “2”; |
| chr7_gl000195_random | transcript | 103067 | 110237 | − | gene_id “Midline_NG28”; transcript_id |
| | | | | | “Midline_NG28.1”; RPKM “3.4060”; cov |
| | | | | | “59.0282”; |
| chr7_gl000195_random | exon | 103067 | 110237 | − | gene_id “Midline_NG28”; transcript_id |
| | | | | | “Midline_NG28.1”; exon “1”; |
| chr8 | transcript | 76014971 | 76016954 | − | gene_id “Midline_NG24”; transcript_id |
| | | | | | “Midline_NG24.1”; RPKM “1.4732”; cov |
| | | | | | “25.5312”; |
| chr8 | exon | 76014971 | 76016954 | − | gene_id “Midline_NG24”; transcript_id |
| | | | | | “Midline_NG24.1”; exon “1”; |
| chr8 | transcript | 128120178 | 128148188 | − | gene_id “Midline_NG25”; transcript_id |
| | | | | | “Midline_NG25.1”; RPKM “3.8473”; cov |
| | | | | | “66.6760”; |
| chr8 | exon | 128120178 | 128148188 | − | gene_id “Midline_NG25”; transcript_id |
| | | | | | “Midline_NG25.1”; exon “1”; |
| chr8 | transcript | 128120178 | 128159468 | − | gene_id “Midline_NG25”; transcript_id |
| | | | | | “Midline_NG25.3”; RPKM “2.1451”; cov |
| | | | | | “37.1756”; |
| chr8 | exon | 128120178 | 128129210 | − | gene_id “Midline_NG25”; transcript_id |
| | | | | | “Midline_NG25.3”; exon “1”; |
| chr8 | exon | 128152989 | 128153103 | − | gene_id “Midline_NG25”; transcript_id |
| | | | | | “Midline_NG25.3”; exon “2”; |
| chr8 | exon | 128153719 | 128153816 | − | gene_id “Midline_NG25”; transcript_id |
| | | | | | “Midline_NG25.3”; exon “3”; |
| chr8 | exon | 128156008 | 128159468 | − | gene_id “Midline_NG25”; transcript_id |
| | | | | | “Midline_NG25.3”; exon “4”; |
| chr8 | transcript | 128151294 | 128159468 | − | gene_id “Midline_NG25”; transcript_id |
| | | | | | “Midline_NG25.2”; RPKM “2.5375”; cov |
| | | | | | “43.9754”; |
| chr8 | exon | 128151294 | 128153103 | − | gene_id “Midline_NG25”; transcript_id |
| | | | | | “Midline_NG25.2”; exon “1”; |
| chr8 | exon | 128153719 | 128159468 | − | gene_id “Midline_NG25”; transcript_id |
| | | | | | “Midline_NG25.2”; exon “2”; |
| chr8 | transcript | 128151294 | 128163711 | − | gene_id “Midline_NG25”; transcript_id |
| | | | | | “Midline_NG25.4”; RPKM “8.8818”; cov |
| | | | | | “153.9259”; |
| chr8 | exon | 128151294 | 128153103 | − | gene_id “Midline_NG25”; transcript_id |
| | | | | | “Midline_NG25.4”; exon “1”; |
| chr8 | exon | 128153719 | 128153816 | − | gene_id “Midline_NG25”; transcript_id |
| | | | | | “Midline_NG25.4”; exon “2”; |
| chr8 | exon | 128156008 | 128163711 | − | gene_id “Midline_NG25”; transcript_id |
| | | | | | “Midline_NG25.4”; exon “3”; |
| chr8 | transcript | 128163752 | 128182015 | − | gene_id “Midline_NG25”; transcript_id |
| | | | | | “Midline_NG25.5”; RPKM “0.9976”; cov |
| | | | | | “17.2894”; |
| chr8 | exon | 128163752 | 128165589 | − | gene_id “Midline_NG25”; transcript_id |
| | | | | | “Midline_NG25.5”; exon “1”; |
| chr8 | exon | 128174167 | 128174329 | − | gene_id “Midline_NG25”; transcript_id |
| | | | | | “Midline_NG25.5”; exon “2”; |
| chr8 | exon | 128181143 | 128182015 | − | gene_id “Midline_NG25”; transcript_id |
| | | | | | “Midline_NG25.5”; exon “3”; |
| chr10 | transcript | 131033896 | 131047803 | − | gene_id “mLPS_NG2”; transcript_id |
| | | | | | “mLPS_NG2.1”; RPKM “10.8022”; cov |
| | | | | | “151.6608”; |
| chr10 | exon | 131033896 | 131047803 | − | gene_id “mLPS_NG2”; transcript_id |
| | | | | | “mLPS_NG2.1”; exon “1”; |
| chr10 | transcript | 131033896 | 131054561 | − | gene_id “mLPS_NG2”; transcript_id |
| | | | | | “mLPS_NG2.2”; RPKM “1.6978”; cov |
| | | | | | “23.8367”; |
| chr10 | exon | 131033896 | 131041247 | − | gene_id “mLPS_NG2”; transcript_id |
| | | | | | “mLPS_NG2.2”; exon “1”; |
| chr10 | exon | 131053471 | 131053599 | − | gene_id “mLPS_NG2”; transcript_id |
| | | | | | “mLPS_NG2.2”; exon “2”; |
| chr10 | exon | 131053975 | 131054561 | − | gene_id “mLPS_NG2”; transcript_id |
| | | | | | “mLPS_NG2.2”; exon “3”; |
| chr10 | transcript | 131033896 | 131056347 | − | gene_id “mLPS_NG2”; transcript_id |
| | | | | | “mLPS_NG2.4”; RPKM “3.9750”; cov |
| | | | | | “55.8079”; |
| chr10 | exon | 131033896 | 131041247 | − | gene_id “mLPS_NG2”; transcript_id |
| | | | | | “mLPS_NG2.4”; exon “1”; |
| chr10 | exon | 131053471 | 131053599 | − | gene_id “mLPS_NG2”; transcript_id |
| | | | | | “mLPS_NG2.4”; exon “2”; |
| chr10 | exon | 131056007 | 131056347 | − | gene_id “mLPS_NG2”; transcript_id |
| | | | | | “mLPS_NG2.4”; exon “3”; |
| chr10 | transcript | 131047971 | 131056347 | − | gene_id “mLPS_NG2”; transcript_id |
| | | | | | “mLPS_NG2.3”; RPKM “1.4198”; cov |
| | | | | | “19.9331”; |
| chr10 | exon | 131047971 | 131053599 | − | gene_id “mLPS_NG2”; transcript_id |
| | | | | | “mLPS_NG2.3”; exon “1”; |
| chr10 | exon | 131056007 | 131056347 | − | gene_id “mLPS_NG2”; transcript_id |
| | | | | | “mLPS_NG2.3”; exon “2”; |
| chr13 | transcript | 53519925 | 53527015 | − | gene_id “mLPS_NG3”; transcript_id |
| | | | | | “mLPS_NG3.1”; RPKM “2.0584”; cov |
| | | | | | “28.9002”; |
| chr13 | exon | 53519925 | 53520170 | − | gene_id “mLPS_NG3”; transcript_id |
| | | | | | “mLPS_NG3.1”; exon “1”; |
| chr13 | exon | 53526864 | 53527015 | − | gene_id “mLPS_NG3”; transcript_id |
| | | | | | “mLPS_NG3.1”; exon “2”; |
| chr13 | transcript | 71563535 | 71574912 | + | gene_id “mLPS_NG5”; transcript_id |
| | | | | | “mLPS_NG5.3”; RPKM “1.5553”; cov |
| | | | | | “21.8360”; |
| chr13 | exon | 71563535 | 71564222 | + | gene_id “mLPS_NG5”; transcript_id |
| | | | | | “mLPS_NG5.3”; exon “1”; |
| chr13 | exon | 71572233 | 71574912 | + | gene_id “mLPS_NG5”; transcript_id |
| | | | | | “mLPS_NG5.3”; exon “2”; |
| chr13 | transcript | 71567950 | 71574912 | + | gene_id “mLPS_NG5”; transcript_id |
| | | | | | “mLPS_NG5.2”; RPKM “3.2833”; cov |
| | | | | | “46.0963”; |
| chr13 | exon | 71567950 | 71574912 | + | gene_id “mLPS_NG5”; transcript_id |
| | | | | | “mLPS_NG5.2”; exon “1”; |
| chr13 | transcript | 71894318 | 71900319 | + | gene_id “mLPS_NG5”; transcript_id |
| | | | | | “mLPS_NG5.1”; RPKM “5.2827”; cov |
| | | | | | “74.1679”; |
| chr13 | exon | 71894318 | 71900319 | + | gene_id “mLPS_NG5”; transcript_id |
| | | | | | “mLPS_NG5.1”; exon “1”; |
| chr13 | transcript | 71885454 | 71885954 | + | gene_id “mLPS_NG4”; transcript_id |
| | | | | | “mLPS_NG4.1”; RPKM “3.4751”; cov |
| | | | | | “48.7904”; |
| chr13 | exon | 71885454 | 71885954 | + | gene_id “mLPS_NG4”; transcript_id |
| | | | | | “mLPS_NG4.1”; exon “1”; |
| chr13 | transcript | 112869718 | 112871768 | + | gene_id “mLPS_NG6”; transcript_id |
| | | | | | “mLPS_NG6.1”; RPKM “1.9196”; cov |
| | | | | | “26.9502”; |
| chr13 | exon | 112869718 | 112871768 | + | gene_id “mLPS_NG6”; transcript_id |
| | | | | | “mLPS_NG6.1”; exon “1”; |
| chr14 | transcript | 59543239 | 59544797 | − | gene_id “mLPS_NG7”; transcript_id |
| | | | | | “mLPS_NG7.1”; RPKM “2.7626”; cov |
| | | | | | “38.7858”; |
| chr14 | exon | 59543239 | 59544797 | − | gene_id “mLPS_NG7”; transcript_id |
| | | | | | “mLPS_NG7.1”; exon “1”; |
| chr17 | transcript | 3323408 | 3327044 | − | gene_id “mLPS_NG8”; transcript_id |
| | | | | | “mLPS_NG8.1”; RPKM “1.9124”; cov |
| | | | | | “26.8499”; |
| chr17 | exon | 3323408 | 3327044 | − | gene_id “mLPS_NG8”; transcript_id |
| | | | | | “mLPS_NG8.1”; exon “1”; |
| chr2 | transcript | 5876719 | 5888324 | − | gene_id “mLPS_NG1”; transcript_id |
| | | | | | “mLPS_NG1.1”; RPKM “1.8575”; cov |
| | | | | | “26.0783”; |
| chr2 | exon | 5876719 | 5879421 | − | gene_id “mLPS_NG1”; transcript_id |
| | | | | | “mLPS_NG1.1”; exon “1”; |
| chr2 | exon | 5885881 | 5885959 | − | gene_id “mLPS_NG1”; transcript_id |
| | | | | | “mLPS_NG1.1”; exon “2”; |
| chr2 | exon | 5887739 | 5888324 | − | gene_id “mLPS_NG1”; transcript_id |
| | | | | | “mLPS_NG1.1”; exon “3”; |
| chr21 | transcript | 33679555 | 33681865 | + | gene_id “mLPS_NG9”; transcript_id |
| | | | | | “mLPS_NG9.1”; RPKM “1.9122”; cov |
| | | | | | “26.8473”; |
| chr21 | exon | 33679555 | 33681865 | + | gene_id “mLPS_NG9”; transcript_id |
| | | | | | “mLPS_NG9.1”; exon “1”; |
| chr1 | transcript | 1212163 | 1214780 | − | gene_id “PATZ1_NG1”; transcript_id |
| | | | | | “PATZ1_NG1.1”; RPKM “2.9763”; cov |
| | | | | | “31.3120”; |
| chr1 | exon | 1212163 | 1214780 | − | gene_id “PATZ1_NG1”; transcript_id |
| | | | | | “PATZ1_NG1.1”; exon “1”; |
| chr10 | transcript | 134208979 | 134210252 | + | gene_id “PATZ1_NG9”; transcript_id |
| | | | | | “PATZ1_NG9.1”; RPKM “2.8520”; cov |
| | | | | | “30.0039”; |
| chr10 | exon | 134208979 | 134210252 | + | gene_id “PATZ1_NG9”; transcript_id |
| | | | | | “PATZ1_NG9.1”; exon “1”; |
| chr11 | transcript | 2170575 | 2170814 | + | gene_id “PATZ1_NG10”; transcript_id |
| | | | | | “PATZ1_NG10.1”; RPKM “2.6742”; cov |
| | | | | | “28.1333”; |
| chr11 | exon | 2170575 | 2170814 | + | gene_id “PATZ1_NG10”; transcript_id |
| | | | | | “PATZ1_NG10.1”; exon “1”; |
| chr11 | transcript | 69634253 | 69635027 | − | gene_id “PATZ1_NG11”; transcript_id |
| | | | | | “PATZ1_NG11.1”; RPKM “7.6575”; cov |
| | | | | | “80.5587”; |
| chr11 | exon | 69634253 | 69635027 | − | gene_id “PATZ1_NG11”; transcript_id |
| | | | | | “PATZ1_NG11.1”; exon “1”; |
| chr14 | transcript | 104776845 | 104786942 | − | gene_id “PATZ1_NG12”; transcript_id |
| | | | | | “PATZ1_NG12.2”; RPKM “3.3659”; cov |
| | | | | | “35.4104”; |
| chr14 | exon | 104776845 | 104781165 | − | gene_id “PATZ1_NG12”; transcript_id |
| | | | | | “PATZ1_NG12.2”; exon “1”; |
| chr14 | exon | 104782698 | 104786942 | − | gene_id “PATZ1_NG12”; transcript_id |
| | | | | | “PATZ1_NG12.2”; exon “2”; |
| chr14 | transcript | 104776845 | 104786942 | − | gene_id “PATZ1_NG12”; transcript_id |
| | | | | | “PATZ1_NG12.3”; RPKM “4.2419”; cov |
| | | | | | “44.6260”; |
| chr14 | exon | 104776845 | 104786942 | − | gene_id “PATZ1_NG12”; transcript_id |
| | | | | | “PATZ1_NG12.3”; exon “1”; |
| chr14 | transcript | 104787023 | 104787463 | − | gene_id “PATZ1_NG12”; transcript_id |
| | | | | | “PATZ1_NG12.1”; RPKM “2.2179”; cov |
| | | | | | “23.3332”; |
| chr14 | exon | 104787023 | 104787463 | − | gene_id “PATZ1_NG12”; transcript_id |
| | | | | | “PATZ1_NG12.1”; exon “1”; |
| chr15 | transcript | 62982408 | 62983234 | + | gene_id “PATZ1_NG13”; transcript_id |
| | | | | | “PATZ1_NG13.1”; RPKM “21.6819”; cov |
| | | | | | “228.0992”; |
| chr15 | exon | 62982408 | 62983234 | + | gene_id “PATZ1_NG13”; transcript_id |
| | | | | | “PATZ1_NG13.1”; exon “1”; |
| chr17 | transcript | 45922563 | 45922901 | + | gene_id “PATZ1_NG14”; transcript_id |
| | | | | | “PATZ1_NG14.1”; RPKM “3.1071”; cov |
| | | | | | “32.6873”; |
| chr17 | exon | 45922563 | 45922901 | + | gene_id “PATZ1_NG14”; transcript_id |
| | | | | | “PATZ1_NG14.1”; exon “1”; |
| chr17 | transcript | 75783410 | 75785600 | + | gene_id “PATZ1_NG15”; transcript_id |
| | | | | | “PATZ1_NG15.2”; RPKM “2.6370”; cov |
| | | | | | “27.7421”; |
| chr17 | exon | 75783410 | 75785600 | + | gene_id “PATZ1_NG15”; transcript_id |
| | | | | | “PATZ1_NG15.2”; exon “1”; |
| chr17 | transcript | 75783410 | 75785600 | + | gene_id “PATZ1_NG15”; transcript_id |
| | | | | | “PATZ1_NG15.3”; RPKM “2.3067”; cov |
| | | | | | “24.2669”; |
| chr17 | exon | 75783410 | 75783627 | + | gene_id “PATZ1_NG15”; transcript_id |
| | | | | | “PATZ1_NG15.3”; exon “1”; |
| chr17 | exon | 75785376 | 75785600 | + | gene_id “PATZ1_NG15”; transcript_id |
| | | | | | “PATZ1_NG15.3”; exon “2”; |
| chr17 | transcript | 75785653 | 75792293 | + | gene_id “PATZ1_NG15”; transcript_id |
| | | | | | “PATZ1_NG15.1”; RPKM “2.1543”; cov |
| | | | | | “22.6639”; |
| chr17 | exon | 75785653 | 75792293 | + | gene_id “PATZ1_NG15”; transcript_id |
| | | | | | “PATZ1_NG15.1”; exon “1”; |
| chr19 | transcript | 1773302 | 1780143 | − | gene_id “PATZ1_NG16”; transcript_id |
| | | | | | “PATZ1_NG16.1”; RPKM “1.0012”; cov |
| | | | | | “10.5324”; |
| chr19 | exon | 1773302 | 1773539 | − | gene_id “PATZ1_NG16”; transcript_id |
| | | | | | “PATZ1_NG16.1”; exon “1”; |
| chr19 | exon | 1773633 | 1773726 | − | gene_id “PATZ1_NG16”; transcript_id |
| | | | | | “PATZ1_NG16.1”; exon “2”; |
| chr19 | exon | 1774035 | 1774166 | − | gene_id “PATZ1_NG16”; transcript_id |
| | | | | | “PATZ1_NG16.1”; exon “3”; |
| chr19 | exon | 1775229 | 1775362 | − | gene_id “PATZ1_NG16”; transcript_id |
| | | | | | “PATZ1_NG16.1”; exon “4”; |
| chr19 | exon | 1776262 | 1777195 | − | gene_id “PATZ1_NG16”; transcript_id |
| | | | | | “PATZ1_NG16.1”; exon “5”; |
| chr19 | exon | 1779040 | 1779111 | − | gene_id “PATZ1_NG16”; transcript_id |
| | | | | | “PATZ1_NG16.1”; exon “6”; |
| chr19 | exon | 1779204 | 1780143 | − | gene_id “PATZ1_NG16”; transcript_id |
| | | | | | “PATZ1_NG16.1”; exon “7”; |
| chr19 | transcript | 51060154 | 51060950 | + | gene_id “PATZ1_NG17”; transcript_id |
| | | | | | “PATZ1 JMG17.1”; RPKM “4.5928”; cov |
| | | | | | “48.3174”; |
| chr1 9 | exon | 51060154 | 51060950 | + | gene_id “PATZ1_NG17”; transcript_id |
| | | | | | “PATZ1_NG17.1”; exon “1”; |
| chr19 | transcript | 51060968 | 51065241 | + | gene_id “PATZ1_NG18”; transcript_id |
| | | | | | “PATZ1_NG18.1”; RPKM “2.0394”; cov |
| | | | | | “21.4553”; |
| chr19 | exon | 51060968 | 51065241 | + | gene_id “PATZ1_NG18”; transcript_id |
| | | | | | “PATZ1_NG18.1”; exon “1”; |
| chr2 | transcript | 239478138 | 239505638 | + | gene_id “PATZ1_NG2”; transcript_id |
| | | | | | “PATZ1_NG2.1”; RPKM “2.1141”; cov |
| | | | | | “22.2409”; |
| chr2 | exon | 239478138 | 239479055 | + | gene_id “PATZ1_NG2”; transcript_id |
| | | | | | “PATZ1_NG2.1”; exon “1”; |
| chr2 | exon | 239479357 | 239479457 | + | gene_id “PATZ1_NG2”; transcript_id |
| | | | | | “PATZ1_NG2.1”; exon “2”; |
| chr2 | exon | 239503583 | 239505638 | + | gene_id “PATZ1_NG2”; transcript_id |
| | | | | | “PATZ1_NG2.1”; exon “3”; |
| chr2 | transcript | 239478138 | 239505638 | + | gene_id “PATZ1_NG2”; transcript_id |
| | | | | | “PATZ1_NG2.2”; RPKM “1.3301”; cov |
| | | | | | “13.9935”; |
| chr2 | exon | 239478138 | 239479055 | + | gene_id “PATZ1_NG2”; transcript_id |
| | | | | | “PATZ1_NG2.2”; exon “1”; |
| chr2 | exon | 239479357 | 239479457 | + | gene_id “PATZ1_NG2”; transcript_id |
| | | | | | “PATZ1_NG2.2”; exon “2”; |
| chr2 | exon | 239504098 | 239505638 | + | gene_id “PATZ1_NG2”; transcript_id |
| | | | | | “PATZ1_NG2.2”; exon “3”; |
| chr2 | transcript | 239478138 | 239483992 | + | gene_id “PATZ1_NG2”; transcript_id |
| | | | | | “PATZ1_NG2.3”; RPKM “2.5665”; cov |
| | | | | | “27.0000”; |
| chr2 | exon | 239478138 | 239479055 | + | gene_id “PATZ1_NG2”; transcript_id |
| | | | | | “PATZ1_NG2.3”; exon “1”; |
| chr2 | exon | 239479357 | 239483992 | + | gene_id “PATZ1_NG2”; transcript_id |
| | | | | | “PATZ1_NG2.3”; exon “2”; |
| chr2 | transcript | 239620076 | 239621883 | + | gene_id “PATZ1_NG3”; transcript_id |
| | | | | | “PATZ1_NG3.1”; RPKM “3.6585”; cov |
| | | | | | “38.4889”; |
| chr2 | exon | 239620076 | 239621883 | + | gene_id “PATZ1_NG3”; transcript_id |
| | | | | | “PATZ1_NG3.1”; exon “1”; |
| chr2 | transcript | 239621988 | 239624075 | + | gene_id “PATZ1_NG4”; transcript_id |
| | | | | | “PATZ1_NG4.1”; RPKM “4.1061”; cov |
| | | | | | “43.1968”; |
| chr2 | exon | 239621988 | 239624075 | + | gene_id “PATZ1_NG4”; transcript_id |
| | | | | | “PATZ1_NG4.1”; exon “1”; |
| chr20 | transcript | 52809662 | 52831410 | − | gene_id “PATZ1_NG19”; transcript_id |
| | | | | | “PATZ1_NG19.3”; RPKM “0.9689”; cov |
| | | | | | “10.1932”; |
| chr20 | exon | 52809662 | 52810276 | − | gene_id “PATZ1_NG19”; transcript_id |
| | | | | | “PATZ1_NG19.3”; exon “1”; |
| chr20 | exon | 52813950 | 52814792 | − | gene_id “PATZ1_NG19”; transcript_id |
| | | | | | “PATZ1_NG19.3”; exon “2”; |
| chr20 | exon | 52829635 | 52829702 | − | gene_id “PATZ1_NG19”; transcript_id |
| | | | | | “PATZ1_NG19.3”; exon “3”; |
| chr20 | exon | 52831173 | 52831410 | − | gene_id “PATZ1_NG19”; transcript_id |
| | | | | | “PATZ1_NG19.3”; exon “4”; |
| chr20 | transcript | 52813414 | 52831410 | − | gene_id “PATZ1_NG19”; transcript_id |
| | | | | | “PATZ1_NG19.2”; RPKM “2.5514”; cov |
| | | | | | “26.8412”; |
| chr20 | exon | 52813414 | 52814792 | − | gene_id “PATZ1_NG19”; transcript_id |
| | | | | | “PATZ1NG19.2”; exon “1”; |
| chr20 | exon | 52829635 | 52829702 | − | gene_id “PATZ1_NG19”; transcript_id |
| | | | | | “PATZ1_NG19.2”; exon “2”; |
| chr20 | exon | 52831173 | 52831410 | − | gene_id “PATZ1_NG19”; transcript_id |
| | | | | | “PATZ1_NG19.2”; exon “3”; |
| chr20 | transcript | 52823374 | 52831410 | − | gene_id “PATZ1_NG19”; transcript_id |
| | | | | | “PATZ1_NG19.1”; RPKM “3.2138”; cov |
| | | | | | “33.8104”; |
| chr20 | exon | 52823374 | 52823595 | − | gene_id “PATZ1_NG19”; transcript_id |
| | | | | | “PATZ1_NG19.1”; exon “1”; |
| chr20 | exon | 52829635 | 52829702 | − | gene_id “PATZ1_NG19”; transcript_id |
| | | | | | “PATZ1_NG19.1”; exon “2”; |
| chr20 | exon | 52831173 | 52831410 | − | gene_id “PATZ1_NG19”; transcript_id |
| | | | | | “PATZ1_NG19.1”; exon “3”; |
| chr21 | transcript | 47453262 | 47453630 | + | gene_id “PATZ1_NG20”; transcript_id |
| | | | | | “PATZ1_NG20.1”; RPKM “3.7321”; cov |
| | | | | | “39.2624”; |
| chr21 | exon | 47453262 | 47453630 | + | gene_id “PATZ1_NG20”; transcript_id |
| | | | | | “PATZ1_NG20.1”; exon “1”; |
| chr21 | transcript | 47453666 | 47454344 | + | gene_id “PATZ1_NG21”; transcript_id |
| | | | | | “PATZ1_NG21.1”; RPKM “4.0558”; cov |
| | | | | | “42.6686”; |
| chr21 | exon | 47453666 | 47454344 | + | gene_id “PATZ1_NG21”; transcript_id |
| | | | | | “PATZ1_NG21.1”; exon “1”; |
| chr22 | transcript | 41084712 | 41087359 | − | gene_id “PATZ1_NG22”; transcript_id |
| | | | | | “PATZ1_NG22.1”; RPKM “3.6400”; cov |
| | | | | | “38.2938”; |
| chr22 | exon | 41084712 | 41087359 | − | gene_id “PATZ1_NG22”; transcript_id |
| | | | | | “PATZ1_NG22.1”; exon “1”; |
| chr3 | transcript | 195488341 | 195494410 | + | gene_id “PATZ1_NG5”; transcript_id |
| | | | | | “PATZ1_NG5.1”; RPKM “15.0300”; cov |
| | | | | | “158.1202”; |
| chr3 | exon | 195488341 | 195494410 | + | gene_id “PATZ1_NG5”; transcript_id |
| | | | | | “PATZ1_NG5.1”; exon “1”; |
| chr3 | transcript | 195494780 | 195497907 | + | gene_id “PATZ1_NG6”; transcript_id |
| | | | | | “PATZ1_NG6.1”; RPKM “9.4405”; cov |
| | | | | | “99.3168”; |
| chr3 | exon | 195494780 | 195497907 | + | gene_id “PATZ1_NG6”; transcript_id |
| | | | | | “PATZ1_NG6.1”; exon “1”; |
| chr6 | transcript | 168764116 | 168764737 | + | gene_id “PATZ1_NG7”; transcript_id |
| | | | | | “PATZ1_NG7.1”; RPKM “2.8197”; cov |
| | | | | | “29.6640”; |
| chr6 | exon | 168764116 | 168764737 | + | gene_id “PATZ1_NG7”; transcript_id |
| | | | | | “PATZ1_NG7.1”; exon “1”; |
| chr8 | transcript | 143697338 | 143700950 | − | gene_id “PATZ1_NG8”; transcript_id |
| | | | | | “PATZ1_NG8.1”; RPKM “4.1842”; cov |
| | | | | | “44.0190”; |
| chr8 | exon | 143697338 | 143700950 | − | gene_id “PATZ1_NG8”; transcript_id |
| | | | | | “PATZ1_NG8.1”; exon “1”; |
| chr1 | transcript | 142683230 | 142683763 | − | gene_id “SFT_NG1”; transcript_id |
| | | | | | “SFT_NG1.1”; RPKM “3.9685”; cov |
| | | | | | “50.9663”; |
| chr1 | exon | 142683230 | 142683763 | − | gene_id “SFT_NG1”; transcript_id |
| | | | | | “SFT_NG1.1”; exon “1”; |
| chr10 | transcript | 30411990 | 30412288 | + | gene_id “SFT_NG17”; transcript_id |
| | | | | | “SFT_NG17.1”; RPKM “5.9000”; cov |
| | | | | | “75.7726”; |
| chr10 | exon | 30411990 | 30412288 | + | gene_id “SFT_NG17”; transcript_id |
| | | | | | “SFT_NG17.1”; exon “1”; |
| chr11 | transcript | 113929287 | 113930169 | + | gene_id “SFT_NG18”; transcript_id |
| | | | | | “SFT_NG18.1”; RPKM “1.6975”; cov |
| | | | | | “21.8011”; |
| chr11 | exon | 113929287 | 113930169 | + | gene_id “SFT_NG18”; transcript_id |
| | | | | | “SFT_NG18.1”; exon “1”; |
| chr11 | transcript | 125991911 | 126010530 | − | gene_id “SFT_NG19”; transcript_id |
| | | | | | “SFT_NG19.1”; RPKM “0.8982”; cov |
| | | | | | “11.5350”; |
| chr11 | exon | 125991911 | 125994379 | − | gene_id “SFT_NG19”; transcript_id |
| | | | | | “SFT_NG19.1”; exon “1”; |
| chr11 | exon | 125994529 | 125994716 | − | gene_id “SFT_NG19”; transcript_id |
| | | | | | “SFT_NG19.1”; exon “2”; |
| chr11 | exon | 125997891 | 125998088 | − | gene_id “SFT_NG19”; transcript_id |
| | | | | | “SFT_NG19.1”; exon “3”; |
| chr11 | exon | 126010014 | 126010530 | − | gene_id “SFT_NG19”; transcript_id |
| | | | | | “SFT_NG19.1”; exon “4”; |
| chr11 | transcript | 125991156 | 125991810 | − | gene_id “SFT_NG20”; transcript_id |
| | | | | | “SFT_NG20.1”; RPKM “2.2721”; cov |
| | | | | | “29.1802”; |
| chr11 | exon | 125991156 | 125991810 | − | gene_id “SFT_NG20”; transcript_id |
| | | | | | “SFT_NG20.1”; exon “1”; |
| chr12 | transcript | 52219697 | 52220242 | − | gene_id “SFT_NG21”; transcript_id |
| | | | | | “SFT_NG21.1”; RPKM “3.7953”; cov |
| | | | | | “48.7418”; |
| chr12 | exon | 52219697 | 52220242 | − | gene_id “SFT_NG21”; transcript_id |
| | | | | | “SFT_NG21.1”; exon “1”; |
| chr14 | transcript | 19959511 | 19960440 | − | gene_id “SFT_NG22”; transcript_id |
| | | | | | “SFT_NG22.1”; RPKM “2.8731”; cov |
| | | | | | “36.8978”; |
| chr14 | exon | 19959511 | 19960440 | − | gene_id “SFT_NG22”; transcript_id |
| | | | | | “SFT_NG22.1”; exon “1”; |
| chr15 | transcript | 70415043 | 70439551 | + | gene_id “SFT_NG23”; transcript_id |
| | | | | | “SFT_NG23.3”; RPKM “1.2002”; cov |
| | | | | | “15.4142”; |
| chr15 | exon | 70415043 | 70416063 | + | gene_id “SFT_NG23”; transcript_id |
| | | | | | “SFT_NG23.3”; exon “1”; |
| chr15 | exon | 70418208 | 70426082 | + | gene_id “SFT_NG23”; transcript_id |
| | | | | | “SFT_NG23.3”; exon “2”; |
| chr15 | exon | 70428193 | 70428354 | + | gene_id “SFT_NG23”; transcript_id |
| | | | | | “SFT_NG23.3”; exon “3”; |
| chr15 | exon | 70434123 | 70439551 | + | gene_id “SFT_NG23”; transcript_id |
| | | | | | “SFT_NG23.3”; exon “4”; |
| chr15 | transcript | 70415043 | 70439551 | + | gene_id “SFT_NG23”; transcript_id |
| | | | | | “SFT_NG23.2”; RPKM “1.5012”; cov |
| | | | | | “19.2789”; |
| chr15 | exon | 70415043 | 70416063 | + | gene_id “SFT_NG23”; transcript_id |
| | | | | | “SFT_NG23.2”; exon “1”; |
| chr15 | exon | 70418208 | 70422746 | + | gene_id “SFT_NG23”; transcript_id |
| | | | | | “SFT_NG23.2”; exon “2”; |
| chr15 | exon | 70434123 | 70439551 | + | gene_id “SFT_NG23”; transcript_id |
| | | | | | “SFT_NG23.2”; exon “3”; |
| chr15 | transcript | 70415043 | 70417653 | + | gene_id “SFT_NG23”; transcript_id |
| | | | | | “SFT_NG23.1”; RPKM “7.2379”; cov |
| | | | | | “92.9542”; |
| chr15 | exon | 70415043 | 70416063 | + | gene_id “SFT_NG23”; transcript_id |
| | | | | | “SFT_NG23.1”; exon “1”; |
| chr15 | exon | 70416370 | 70417653 | + | gene_id “SFT_NG23”; transcript_id |
| | | | | | “SFT_NG23.1”; exon “2”; |
| chr15 | transcript | 70415043 | 70439551 | + | gene_id “SFT_NG23”; transcript_id |
| | | | | | “SFT_NG23.5”; RPKM “0.9600”; cov |
| | | | | | “12.3285”; |
| chr15 | exon | 70415043 | 70416063 | + | gene_id “SFT_NG23”; transcript_id |
| | | | | | “SFT_NG23.5”; exon “1”; |
| chr15 | exon | 70418208 | 70429114 | + | gene_id “SFT_NG23”; transcript_id |
| | | | | | “SFT_NG23.5”; exon “2”; |
| chr15 | exon | 70434123 | 70439551 | + | gene_id “SFT_NG23”; transcript_id |
| | | | | | “SFT_NG23.5”; exon “3”; |
| chr15 | transcript | 70415043 | 70439551 | + | gene_id “SFT_NG23”; transcript_id |
| | | | | | “SFT_NG23.4”; RPKM “0.8231”; cov |
| | | | | | “10.5715”; |
| chr15 | exon | 70415043 | 70416063 | + | gene_id “SFT_NG23”; transcript_id |
| | | | | | “SFT_NG23.4”; exon “1”; |
| chr15 | exon | 70418208 | 70426082 | + | gene_id “SFT_NG23”; transcript_id |
| | | | | | “SFT_NG23.4”; exon “2”; |
| chr15 | exon | 70428193 | 70429114 | + | gene_id “SFT_NG23”; transcript_id |
| | | | | | “SFT_NG23.4”; exon “3”; |
| chr15 | exon | 70434123 | 70439551 | + | gene_id “SFT_NG23”; transcript_id |
| | | | | | “SFT_NG23.4”; exon “4”; |
| chr15 | transcript | 70911175 | 70916508 | − | gene_id “SFT_NG24”; transcript_id |
| | | | | | “SFT_NG24.1”; RPKM “4.0989”; cov |
| | | | | | “52.6406”; |
| chr15 | exon | 70911175 | 70916508 | − | gene_id “SFT_NG24”; transcript_id |
| | | | | | “SFT_NG24.1”; exon “1”; |
| chr15 | transcript | 71101764 | 71115313 | + | gene_id “SFT_NG25”; transcript_id |
| | | | | | “SFT_NG25.1”; RPKM “2.0099”; cov |
| | | | | | “25.8122”; |
| chr15 | exon | 71101764 | 71102098 | + | gene_id “SFT_NG25”; transcript_id |
| | | | | | “SFT_NG25.1”; exon “1”; |
| chr15 | exon | 71102735 | 71103060 | + | gene_id “SFT_NG25”; transcript_id |
| | | | | | “SFT_NG25.1”; exon “2”; |
| chr15 | exon | 71109090 | 71109264 | + | gene_id “SFT_NG25”; transcript_id |
| | | | | | “SFT_NG25.1”; exon “3”; |
| chr15 | exon | 71109406 | 71115313 | + | gene_id “SFT_NG25”; transcript_id |
| | | | | | “SFT_NG25.1”; exon “4”; |
| chr15 | transcript | 71101764 | 71115313 | + | gene_id “SFT_NG25”; transcript_id |
| | | | | | “SFT_NG25.2”; RPKM “6.9654”; cov |
| | | | | | “89.4548”; |
| chr15 | exon | 71101764 | 71106777 | + | gene_id “SFT_NG25”; transcript_id |
| | | | | | “SFT_NG25.2”; exon “1”; |
| chr15 | exon | 71106824 | 71109264 | + | gene_id “SFT_NG25”; transcript_id |
| | | | | | “SFT_NG25.2”; exon “2”; |
| chr15 | exon | 71109406 | 71115313 | + | gene_id “SFT_NG25”; transcript_id |
| | | | | | “SFT_NG25.2”; exon “3”; |
| chr15 | transcript | 71101764 | 71115313 | + | gene_id “SFT_NG25”; transcript_id |
| | | | | | “SFT_NG25.3”; RPKM “5.8781”; cov |
| | | | | | “75.4908”; |
| chr15 | exon | 71101764 | 71109264 | + | gene_id “SFT_NG25”; transcript_id |
| | | | | | “SFT_NG25.3”; exon “1”; |
| chr15 | exon | 71109406 | 71115313 | + | gene_id “SFT_NG25”; transcript_id |
| | | | | | “SFT_NG25.3”; exon “2”; |
| chr16 | transcript | 85363530 | 85364961 | + | gene_id “SFT_NG26”; transcript_id |
| | | | | | “SFT_NG26.1”; RPKM “4.2046”; cov |
| | | | | | “53.9986”; |
| chr16 | exon | 85363530 | 85364961 | + | gene_id “SFT_NG26”; transcript_id |
| | | | | | “SFT_NG26.1”; exon “1”; |
| chr17 | transcript | 48035752 | 48037167 | − | gene_id “SFT_NG27”; transcript_id |
| | | | | | “SFT_NG27.1”; RPKM “6.0701”; cov |
| | | | | | “77.9562”; |
| chr17 | exon | 48035752 | 48037167 | − | gene_id “SFT_NG27”; transcript_id |
| | | | | | “SFT_NG27.1exon “1”; |
| chr17 | transcript | 48037188 | 48037448 | − | gene_id “SFT_NG28”; transcript_id |
| | | | | | “SFT_NG28.1”; RPKM “4.9350”; cov |
| | | | | | “63.3793”; |
| chr17 | exon | 48037188 | 48037448 | − | gene_id “SFT_NG28”; transcript_id |
| | | | | | “SFT_NG28.1”; exon “1”; |
| chr18 | transcript | 45935913 | 45943415 | + | gene_id “SFT_NG29”; transcript_id |
| | | | | | “SFT_NG29.1”; RPKM “2.5746”; cov |
| | | | | | “33.0651”; |
| chr18 | exon | 45935913 | 45943415 | + | gene_id “SFT_NG29”; transcript_id |
| | | | | | “SFT_NG29.1”; exon “1”; |
| chr18 | transcript | 46491779 | 46493562 | − | gene_id “SFT_NG30”; transcript_id |
| | | | | | “SFT_NG30.1”; RPKM “1.7619”; cov |
| | | | | | “22.6277”; |
| chr18 | exon | 46491779 | 46493562 | − | gene_id “SFT_NG30”; transcript_id |
| | | | | | “SFT_NG30.1”; exon “1”; |
| chr18 | transcript | 46493740 | 46496736 | − | gene_id “SFT_NG30”; transcript_id |
| | | | | | “SFT_NG30.2”; RPKM “1.9060”; cov |
| | | | | | “24.4788”; |
| chr18 | exon | 46493740 | 46496736 | − | gene_id “SFT_NG30”; transcript_id |
| | | | | | “SFT_NG30.2”; exon “1”; |
| chr19 | transcript | 1860130 | 1862091 | − | gene_id “SFT_NG31”; transcript_id |
| | | | | | “SFT_NG31.1”; RPKM “1.9486”; cov |
| | | | | | “25.0257”; |
| chr19 | exon | 1860130 | 1862091 | − | gene_id “SFT_NG31”; transcript_id |
| | | | | | “SFT_NG31.1”; exon “1”; |
| chr19 | transcript | 15217570 | 15218137 | + | gene_id “SFT_NG32”; transcript_id |
| | | | | | “SFT_NG32.1”; RPKM “1.0936”; cov |
| | | | | | “14.0444”; |
| chr19 | exon | 15217570 | 15217705 | + | gene_id “SFT_NG32”; transcript_id |
| | | | | | “SFT_NG32.1”; exon “1”; |
| chr19 | exon | 15217818 | 15218137 | + | gene_id “SFT_NG32”; transcript_id |
| | | | | | “SFT_NG32.1”; exon “2”; |
| chr19 | transcript | 46603199 | 46621713 | − | gene_id “SFT_NG33”; transcript_id |
| | | | | | “SFT_NG33.1”; RPKM “2.2762”; cov |
| | | | | | “29.2330”; |
| chr19 | exon | 46603199 | 46605136 | − | gene_id “SFT_NG33”; transcript_id |
| | | | | | “SFT_NG33.1”; exon “1”; |
| chr19 | exon | 46612199 | 46612353 | − | gene_id “SFT_NG33”; transcript_id |
| | | | | | “SFT_NG33.1”; exon “2”; |
| chr19 | exon | 46619074 | 46619278 | − | gene_id “SFT_NG33”; transcript_id |
| | | | | | “SFT_NG33.1”; exon “3”; |
| chr19 | exon | 46621562 | 46621713 | − | gene_id “SFT_NG33”; transcript_id |
| | | | | | “SFT_NG33.1”; exon “4”; |
| chr2 | transcript | 40841005 | 40875354 | − | gene_id “SFT_NG2”; transcript_id |
| | | | | | “SFT_NG2.1”; RPKM “1.0623”; cov |
| | | | | | “13.6430”; |
| chr2 | exon | 40841005 | 40845769 | − | gene_id “SFT_NG2”; transcript_id |
| | | | | | “SFT_NG2.1”; exon “1”; |
| chr2 | exon | 40845916 | 40846062 | − | gene_id “SFT_NG2”; transcript_id |
| | | | | | “SFT_NG2.1”; exon “2”; |
| chr2 | exon | 40847405 | 40847459 | − | gene_id “SFT_NG2”; transcript_id |
| | | | | | “SFT_NG2.1”; exon “3”; |
| chr2 | exon | 40847806 | 40847858 | − | gene_id “SFT_NG2”; transcript_id |
| | | | | | “SFT_NG2.1”; exon “4”; |
| chr2 | exon | 40866233 | 40866285 | − | gene_id “SFT_NG2”; transcript_id |
| | | | | | “SFT_NG2.1”; exon “5”; |
| chr2 | exon | 40875231 | 40875354 | − | gene_id “SFT_NG2”; transcript_id |
| | | | | | “SFT_NG2.1”; exon “6”; |
| chr2 | transcript | 42274184 | 42274859 | + | gene_id “SFT_NG3”; transcript_id |
| | | | | | “SFT_NG3.1”; RPKM “1.7380”; cov |
| | | | | | “22.3210”; |
| chr2 | exon | 42274184 | 42274859 | + | gene_id “SFT_NG3”; transcript_id |
| | | | | | “SFT_NG3.1”; exon “1”; |
| chr2 | transcript | 78485784 | 78605970 | + | gene_id “SFT_NG4”; transcript_id |
| | | | | | “SFT_NG4.5”; RPKM “0.7852”; cov |
| | | | | | “10.0836”; |
| chr2 | exon | 78485784 | 78486086 | + | gene_id “SFT_NG4”; transcript_id |
| | | | | | “SFT_NG4.5”; exon “1”; |
| chr2 | exon | 78545547 | 78545619 | + | gene_id “SFT_NG4”; transcript_id |
| | | | | | “SFT_NG4.5”; exon “2”; |
| chr2 | exon | 78545877 | 78545971 | + | gene_id “SFT_NG4”; transcript_id |
| | | | | | “SFT_NG4.5”; exon “3”; |
| chr2 | exon | 78603272 | 78605970 | + | gene_id “SFT_NG4”; transcript_id |
| | | | | | “SFT_NG4.5”; exon “4”; |
| chr2 | transcript | 78485784 | 78593232 | + | gene_id “SFT_NG4”; transcript_id |
| | | | | | “SFT_NG4.6”; RPKM “1.8657”; cov |
| | | | | | “23.9610”; |
| chr2 | exon | 78485784 | 78486086 | + | gene_id “SFT_NG4”; transcript_id |
| | | | | | “SFT_NG4.6”; exon “1”; |
| chr2 | exon | 78545547 | 78545619 | + | gene_id “SFT_NG4”; transcript_id |
| | | | | | “SFT_NG4.6”; exon “2”; |
| chr2 | exon | 78545877 | 78545971 | + | gene_id “SFT_NG4”; transcript_id |
| | | | | | “SFT_NG4.6”; exon “3”; |
| chr2 | exon | 78580161 | 78580252 | + | gene_id “SFT_NG4”; transcript_id |
| | | | | | “SFT_NG4.6”; exon “4”; |
| chr2 | exon | 78588656 | 78593232 | + | gene_id “SFT_NG4”; transcript_id |
| | | | | | “SFT_NG4.6”; exon “5”; |
| chr2 | transcript | 78485784 | 78593232 | + | gene_id “SFT_NG4”; transcript_id |
| | | | | | “SFT_NG4.7”; RPKM “1.1276”; cov |
| | | | | | “14.4812”; |
| chr2 | exon | 78485784 | 78486086 | + | gene_id “SFT_NG4”; transcript_id |
| | | | | | “SFT_NG4.7”; exon “1”; |
| chr2 | exon | 78545547 | 78545619 | + | gene_id “SFT_NG4”; transcript_id |
| | | | | | “SFT_NG4.7”; exon “2”; |
| chr2 | exon | 78545877 | 78545971 | + | gene_id “SFT_NG4”; transcript_id |
| | | | | | “SFT_NG4.7”; exon “3”; |
| chr2 | exon | 78588656 | 78593232 | + | gene_id “SFT_NG4”; transcript_id |
| | | | | | “SFT_NG4.7”; exon “4”; |
| chr2 | transcript | 78485784 | 78593232 | + | gene_id “SFT_NG4”; transcript_id |
| | | | | | “SFT_NG4.8”; RPKM “1.5300”; cov |
| | | | | | “19.6487”; |
| chr2 | exon | 78485784 | 78486086 | + | gene_id “SFT_NG4”; transcript_id |
| | | | | | “SFT_NG4.8”; exon “1”; |
| chr2 | exon | 78545547 | 78545619 | + | gene_id “SFT_NG4”; transcript_id |
| | | | | | “SFT_NG4.8”; exon “2”; |
| chr2 | exon | 78545877 | 78545971 | + | gene_id “SFT_NG4”; transcript_id |
| | | | | | “SFT_NG4.8”; exon “3”; |
| chr2 | exon | 78560741 | 78560859 | + | gene_id “SFT_NG4”; transcript_id |
| | | | | | “SFT_NG4.8”; exon “4”; |
| chr2 | exon | 78588656 | 78593232 | + | gene_id “SFT_NG4”; transcript_id |
| | | | | | “SFT_NG4.8”; exon “5”; |
| chr2 | transcript | 78485784 | 78582099 | + | gene_id “SFT_NG4”; transcript_id |
| | | | | | “SFT_NG4.9”; RPKM “0.8169”; cov |
| | | | | | “10.4915”; |
| chr2 | exon | 78485784 | 78486086 | + | gene_id “SFT_NG4”; transcript_id |
| | | | | | “SFT_NG4.9”; exon “1”; |
| chr2 | exon | 78545547 | 78545619 | + | gene_id “SFT_NG4”; transcript_id |
| | | | | | “SFT_NG4.9”; exon “2”; |
| chr2 | exon | 78545877 | 78545971 | + | gene_id “SFT_NG4”; transcript_id |
| | | | | | “SFT_NG4.9”; exon “3”; |
| chr2 | exon | 78560741 | 78560859 | + | gene_id “SFT_NG4”; transcript_id |
| | | | | | “SFT_NG4.9”; exon “4”; |
| chr2 | exon | 78580161 | 78582099 | + | gene_id “SFT_NG4”; transcript_id |
| | | | | | “SFT_NG4.9”; exon “5”; |
| chr2 | transcript | 78485784 | 78553796 | + | gene_id “SFT_NG4”; transcript_id |
| | | | | | “SFT_NG4.3”; RPKM “1.0557”; cov |
| | | | | | “13.5578”; |
| chr2 | exon | 78485784 | 78486086 | + | gene_id “SFT_NG4”; transcript_id |
| | | | | | “SFT_NG4.3”; exon “1”; |
| chr2 | exon | 78545547 | 78545652 | + | gene_id “SFT_NG4”; transcript_id |
| | | | | | “SFT_NG4.3”; exon “2”; |
| chr2 | exon | 78545877 | 78545971 | + | gene_id “SFT_NG4”; transcript_id |
| | | | | | “SFT_NG4.3”; exon “3”; |
| chr2 | exon | 78550761 | 78553796 | + | gene_id “SFT_NG4”; transcript_id |
| | | | | | “SFT_NG4.3”; exon “4”; |
| chr2 | transcript | 78485784 | 78545759 | + | gene_id “SFT_NG4”; transcript_id |
| | | | | | “SFT_NG4.2”; RPKM “5.6629”; cov |
| | | | | | “72.7268”; |
| chr2 | exon | 78485784 | 78486086 | + | gene_id “SFT_NG4”; transcript_id |
| | | | | | “SFT_NG4.2”; exon “1”; |
| chr2 | exon | 78545547 | 78545759 | + | gene_id “SFT_NG4”; transcript_id |
| | | | | | “SFT_NG4.2”; exon “2”; |
| chr2 | transcript | 78543617 | 78553796 | + | gene_id “SFT_NG4”; transcript_id |
| | | | | | “SFT_NG4.4”; RPKM “1.4526”; cov |
| | | | | | “18.6547”; |
| chr2 | exon | 78543617 | 78545619 | + | gene_id “SFT_NG4”; transcript_id |
| | | | | | “SFT_NG4.4”; exon “1”; |
| chr2 | exon | 78545877 | 78545971 | + | gene_id “SFT_NG4”; transcript_id |
| | | | | | “SFT_NG4.4”; exon “2”; |
| chr2 | exon | 78550761 | 78553796 | + | gene_id “SFT_NG4”; transcript_id |
| | | | | | “SFT_NG4.4”; exon “3”; |
| chr2 | transcript | 78585803 | 78593232 | + | gene_id “SFT_NG4”; transcript_id |
| | | | | | “SFT_NG4.1”; RPKM “1.8700”; cov |
| | | | | | “24.0155”; |
| chr2 | exon | 78585803 | 78593232 | + | gene_id “SFT_NG4”; transcript_id |
| | | | | | “SFT_NG4.1”; exon “1”; |
| chr2 | transcript | 157492668 | 157511012 | − | gene_id “SFT_NG5”; transcript_id |
| | | | | | “SFT_NG5.1”; RPKM “2.3180”; cov |
| | | | | | “29.7699”; |
| chr2 | exon | 157492668 | 157496164 | − | gene_id “SFT_NG5”; transcript_id |
| | | | | | “SFT_NG5.1”; exon “1”; |
| chr2 | exon | 157498197 | 157498338 | − | gene_id “SFT_NG5”; transcript_id |
| | | | | | “SFT_NG5.1”; exon “2”; |
| chr2 | exon | 157503898 | 157504173 | − | gene_id “SFT_NG5”; transcript_id |
| | | | | | “SFT_NG5.1”; exon “3”; |
| chr2 | exon | 157507476 | 157507593 | − | gene_id “SFT_NG5”; transcript_id |
| | | | | | “SFT_NG5.1”; exon “4”; |
| chr2 | exon | 157510573 | 157511012 | − | gene_id “SFT_NG5”; transcript_id |
| | | | | | “SFT_NG5.1”; exon “5”; |
| chr2 | transcript | 157492668 | 157511012 | − | gene_id “SFT_NG5”; transcript_id |
| | | | | | “SFT_NG5.2”; RPKM “3.3591”; cov |
| | | | | | “43.1400”; |
| chr2 | exon | 157492668 | 157496164 | − | gene_id “SFT_NG5”; transcript_id |
| | | | | | “SFT_NG5.2”; exon “1”; |
| chr2 | exon | 157498197 | 157498338 | − | gene_id “SFT_NG5”; transcript_id |
| | | | | | “SFT_NG5.2”; exon “2”; |
| chr2 | exon | 157503898 | 157504173 | − | gene_id “SFT_NG5”; transcript_id |
| | | | | | “SFT_NG5.2”; exon “3”; |
| chr2 | exon | 157507645 | 157508107 | − | gene_id “SFT_NG5”; transcript_id |
| | | | | | “SFT_NG5.2”; exon “4”; |
| chr2 | exon | 157509640 | 157509729 | − | gene_id “SFT_NG5”; transcript_id |
| | | | | | “SFT_NG5.2”; exon “5”; |
| chr2 | exon | 157510573 | 157511012 | − | gene_id “SFT_NG5”; transcript_id |
| | | | | | “SFT_NG5.2”; exon “6”; |
| chr22 | transcript | 16288123 | 16288552 | − | gene_id “SFT_NG34”; transcript_id |
| | | | | | “SFT_NG34.1”; RPKM “8.7515”; cov |
| | | | | | “112.3930”; |
| chr22 | exon | 16288123 | 16288552 | − | gene_id “SFT_NG34”; transcript_id |
| | | | | | “SFT_NG34.1”; exon “1”; |
| chr22 | transcript | 30723059 | 30723431 | − | gene_id “SFT_NG35”; transcript_id |
| | | | | | “SFT_NG35.1”; RPKM “3.0376”; cov |
| | | | | | “39.0107”; |
| chr22 | exon | 30723059 | 30723431 | − | gene_id “SFT_NG35”; transcript_id |
| | | | | | “SFT_NG35.1”; exon “1”; |
| chr3 | transcript | 52056479 | 52058737 | + | gene_id “SFT_NG6”; transcript_id |
| | | | | | “SFT_NG6.1”; RPKM “1.6012”; cov |
| | | | | | “20.5642”; |
| chr3 | exon | 52056479 | 52058737 | + | gene_id “SFT_NG6”; transcript_id |
| | | | | | “SFT_NG6.1”; exon “1”; |
| chr3 | transcript | 52488135 | 52489443 | − | gene_id “SFT_NG7”; transcript_id |
| | | | | | “SFT_NG7.1”; RPKM “1.6606”; cov |
| | | | | | “21.3270”; |
| chr3 | exon | 52488135 | 52489443 | − | gene_id “SFT_NG7”; transcript_id |
| | | | | | “SFT_NG7.1”; exon “1”; |
| chr3 | transcript | 87235969 | 87258938 | + | gene_id “SFT_NG8”; transcript_id |
| | | | | | “SFT_NG8.1”; RPKM “2.3137”; cov |
| | | | | | “29.7144”; |
| chr3 | exon | 87235969 | 87236116 | + | gene_id “SFT_NG8”; transcript_id |
| | | | | | “SFT_NG8.1”; exon “1”; |
| chr3 | exon | 87238393 | 87238579 | + | gene_id “SFT_NG8”; transcript_id |
| | | | | | “SFT_NG8.1”; exon “2”; |
| chr3 | exon | 87239325 | 87239534 | + | gene_id “SFT_NG8”; transcript_id |
| | | | | | “SFT_NG8.1”; exon “3”; |
| chr3 | exon | 87255460 | 87258938 | + | gene_id “SFT_NG8”; transcript_id |
| | | | | | “SFT_NG8.1”; exon “4”; |
| chr3 | transcript | 87235969 | 87258938 | + | gene_id “SFT_NG8”; transcript_id |
| | | | | | “SFT_NG8.2”; RPKM “4.1247”; cov |
| | | | | | “52.9719”; |
| chr3 | exon | 87235969 | 87236116 | + | gene_id “SFT_NG8”; transcript_id |
| | | | | | “SFT_NG8.2”; exon “1”; |
| chr3 | exon | 87239325 | 87239534 | + | gene_id “SFT_NG8”; transcript_id |
| | | | | | “SFT_NG8.2”; exon “2”; |
| chr3 | exon | 87255460 | 87258938 | + | gene_id “SFT_NG8”; transcript_id |
| | | | | | “SFT_NG8.2”; exon “3”; |
| chr3 | transcript | 87235969 | 87258938 | + | gene_id “SFT_NG8”; transcript_id |
| | | | | | “SFT_NG8.3”; RPKM “2.2814”; cov |
| | | | | | “29.2990”; |
| chr3 | exon | 87235969 | 87236116 | + | gene_id “SFT_NG8”; transcript_id |
| | | | | | “SFT_NG8.3”; exon “1”; |
| chr3 | exon | 87239325 | 87239534 | + | gene_id “SFT_NG8”; transcript_id |
| | | | | | “SFT_NG8.3”; exon “2”; |
| chr3 | exon | 87255460 | 87255548 | + | gene_id “SFT_NG8”; transcript_id |
| | | | | | “SFT_NG8.3”; exon “3”; |
| chr3 | exon | 87255968 | 87258938 | + | gene_id “SFT_NG8”; transcript_id |
| | | | | | “SFT_NG8.3”; exon “4”; |
| chr3 | transcript | 184429880 | 184430804 | + | gene_id “SFT_NG9”; transcript_id |
| | | | | | “SFT_NG9.1”; RPKM “4.2790”; cov |
| | | | | | “54.9540”; |
| chr3 | exon | 184429880 | 184430804 | + | gene_id “SFT_NG9”; transcript_id |
| | | | | | “SFT_NG9.1”; exon “1”; |
| chr3 | transcript | 184442119 | 184446869 | + | gene_id “SFT_NG9”; transcript_id |
| | | | | | “SFT_NG9.2”; RPKM “1.1517”; cov |
| | | | | | “14.7911”; |
| chr3 | exon | 184442119 | 184443993 | + | gene_id “SFT_NG9”; transcript_id |
| | | | | | “SFT_NG9.2”; exon “1”; |
| chr3 | exon | 184445188 | 184445368 | + | gene_id “SFT_NG9”; transcript_id |
| | | | | | “SFT_NG9.2”; exon “2”; |
| chr3 | exon | 184446622 | 184446869 | + | gene_id “SFT_NG9”; transcript_id |
| | | | | | “SFT_NG9.2”; exon “3”; |
| chr5 | transcript | 115117574 | 115125147 | + | gene_id “SFT_NG10”; transcript_id |
| | | | | | “SFT_NG10.1”; RPKM “0.8285”; cov |
| | | | | | “10.6399”; |
| chr5 | exon | 115117574 | 115117698 | + | gene_id “SFT_NG10”; transcript_id |
| | | | | | “SFT_NG10.1”; exon “1”; |
| chr5 | exon | 115121124 | 115125147 | + | gene_id “SFT_NG10”; transcript_id |
| | | | | | “SFT_NG10.1”; exon “2”; |
| chr6 | transcript | 41420105 | 41457322 | − | gene_id “SFT_NG11”; transcript_id |
| | | | | | “SFT_NG11.1”; RPKM “1.7938”; cov |
| | | | | | “23.0371”; |
| chr6 | exon | 41420105 | 41421058 | − | gene_id “SFT_NG11”; transcript_id |
| | | | | | “SFT_NG11.1”; exon “1”; |
| chr6 | exon | 41454803 | 41454867 | − | gene_id “SFT_NG11”; transcript_id |
| | | | | | “SFT_NG11.1”; exon “2”; |
| chr6 | exon | 41457219 | 41457322 | − | gene_id “SFT_NG11”; transcript_id |
| | | | | | “SFT_NG11.1”; exon “3”; |
| chr6 | transcript | 41471782 | 41472769 | + | gene_id “SFT_NG12”; transcript_id |
| | | | | | “SFT_NG12.1”; RPKM “2.3489”; cov |
| | | | | | “30.1660”; |
| chr6 | exon | 41471782 | 41472769 | + | gene_id “SFT_NG12”; transcript_id |
| | | | | | “SFT_NG12.1”; exon “1”; |
| chr6 | transcript | 43706320 | 43736422 | + | gene_id “SFT_NG13”; transcript_id |
| | | | | | “SFT_NG13.1”; RPKM “1.7937”; cov |
| | | | | | “23.0357”; |
| chr6 | exon | 43706320 | 43706643 | + | gene_id “SFT_NG13”; transcript_id |
| | | | | | “SFT_NG13.1”; exon “1”; |
| chr6 | exon | 43735802 | 43736422 | + | gene_id “SFT_NG13”; transcript_id |
| | | | | | “SFT_NG13.1”; exon “2”; |
| chr8 | transcript | 49313376 | 49396211 | + | gene_id “SFT_NG14”; transcript_id |
| | | | | | “SFT_NG14.1”; RPKM “2.0826”; cov |
| | | | | | “26.7458”; |
| chr8 | exon | 49313376 | 49314160 | + | gene_id “SFT_NG14”; transcript_id |
| | | | | | “SFT_NG14.1”; exon “1”; |
| chr8 | exon | 49315862 | 49315985 | + | gene_id “SFT_NG14”; transcript_id |
| | | | | | “SFT_NG14.1”; exon “2”; |
| chr8 | exon | 49336913 | 49337075 | + | gene_id “SFT_NG14”; transcript_id |
| | | | | | “SFT_NG14.1”; exon “3”; |
| chr8 | exon | 49386058 | 49396211 | + | gene_id “SFT_NG14”; transcript_id |
| | | | | | “SFT_NG14.1”; exon “4”; |
| chr9 | transcript | 70838941 | 70842110 | + | gene_id “SFT_NG15”; transcript_id |
| | | | | | “SFT_NG15.1”; RPKM “1.6529”; cov |
| | | | | | “21.2274”; |
| chr9 | exon | 70838941 | 70842110 | + | gene_id “SFT_NG15”; transcript_id |
| | | | | | “SFT_NG15.1”; exon “1”; |
| chr9 | transcript | 126761041 | 126761848 | + | gene_id “SFT_NG16”; transcript_id |
| | | | | | “SFT_NG16.1”; RPKM “2.2860”; cov |
| | | | | | “29.3584”; |
| chr9 | exon | 126761041 | 126761848 | + | gene_id “SFT_NG16”; transcript_id |
| | | | | | “SFT_NG16.1”; exon “1”; |
| chrUn_gl000224 | transcript | 32128 | 32740 | − | gene_id “SFT_NG36”; transcript_id |
| | | | | | “SFT_NG36.1”; RPKM “1.7292”; cov |
| | | | | | “22.2072”; |
| chrUn_gl000224 | exon | 32128 | 32740 | − | gene_id “SFT_NG36”; transcript_id |
| | | | | | “SFT_NG36.1”; exon “1”; |
| chr1 | transcript | 197928257 | 197975079 | + | gene_id “TFE3_NG1”; transcript_id |
| | | | | | “TFE3_NG1.1”; RPKM “1.1747”; cov |
| | | | | | “17.0491”; |
| chr1 | exon | 197928257 | 197928347 | + | gene_id “TFE3_NG1”; transcript_id |
| | | | | | “TFE3_NG1.1”; exon “1”; |
| chr1 | exon | 197966750 | 197966879 | + | gene_id “TFE3_NG1”; transcript_id |
| | | | | | “TFE3_NG1.1”; exon “2”; |
| chr1 | exon | 197969301 | 197975079 | + | gene_id “TFE3_NG1”; transcript_id |
| | | | | | “TFE3_NG1.1”; exon “3”; |
| chr1 | transcript | 197928257 | 198018376 | + | gene_id “TFE3_NG1”; transcript_id |
| | | | | | “TFE3_NG1.2”; RPKM “0.9345”; cov |
| | | | | | “13.5628”; |
| chr1 | exon | 197928257 | 197928347 | + | gene_id “TFE3_NG1”; transcript_id |
| | | | | | “TFE3_NG1.2”; exon “1”; |
| chr1 | exon | 198004177 | 198004334 | + | gene_id “TFE3_NG1”; transcript_id |
| | | | | | “TFE3_NG1.2”; exon “2”; |
| chr1 | exon | 198006277 | 198006464 | + | gene_id “TFE3_NG1”; transcript_id |
| | | | | | “TFE3_NG1.2”; exon “3”; |
| chr1 | exon | 198010742 | 198010799 | + | gene_id “TFE3_NG1”; transcript_id |
| | | | | | “TFE3_NG1.2”; exon “4”; |
| chr1 | exon | 198017865 | 198018376 | + | gene_id “TFE3_NG1”; transcript_id |
| | | | | | “TFE3_NG1.2”; exon “5”; |
| chr1 | transcript | 197928257 | 198014754 | + | gene_id “TFE3_NG1”; transcript_id |
| | | | | | “TFE3_NG1.3”; RPKM “1.9316”; cov |
| | | | | | “28.0349”; |
| chr1 | exon | 197928257 | 197928347 | + | gene_id “TFE3_NG1”; transcript_id |
| | | | | | “TFE3_NG1.3”; exon “1”; |
| chr1 | exon | 198004177 | 198004334 | + | gene_id “TFE3_NG1”; transcript_id |
| | | | | | “TFE3_NG1.3”; exon “2”; |
| chr1 | exon | 198006277 | 198014754 | + | gene_id “TFE3_NG1”; transcript_id |
| | | | | | “TFE3_NG1.3”; exon “3”; |
| chr1 | transcript | 197928257 | 198014754 | + | gene_id “TFE3_NG1”; transcript_id |
| | | | | | “TFE3_NG1.4”; RPKM “0.9085”; cov |
| | | | | | “13.1861”; |
| chr1 | exon | 197928257 | 197928347 | + | gene_id “TFE3_NG1”; transcript_id |
| | | | | | “TFE3_NG1.4”; exon “1”; |
| chr1 | exon | 198004177 | 198004334 | + | gene_id “TFE3_NG1”; transcript_id |
| | | | | | “TFE3_NG1.4”; exon “2”; |
| chr1 | exon | 198006277 | 198006464 | + | gene_id “TFE3_NG1”; transcript_id |
| | | | | | “TFE3_NG1.4”; exon “3”; |
| chr1 | exon | 198010742 | 198010799 | + | gene_id “TFE3_NG1”; transcript_id |
| | | | | | “TFE3_NG1.4”; exon “4”; |
| chr1 | exon | 198013482 | 198014754 | + | gene_id “TFE3_NG1”; transcript_id |
| | | | | | “TFE3_NG1.4”; exon “5”; |
| chr1 | transcript | 198103357 | 198104387 | + | gene_id “TFE3_NG2”; transcript_id |
| | | | | | “TFE3_NG2.1”; RPKM “2.6741”; cov |
| | | | | | “38.8118”; |
| chr1 | exon | 198103357 | 198104387 | + | gene_id “TFE3_NG2”; transcript_id |
| | | | | | “TFE3_NG2.1”; exon “1”; |
| chr12 | transcript | 265578 | 272387 | − | gene_id “TFE3_NG5”; transcript_id |
| | | | | | “TFE3_NG5.1”; RPKM “14.3596”; cov |
| | | | | | “208.4113”; |
| chr12 | exon | 265578 | 272387 | − | gene_id “TFE3_NG5”; transcript_id |
| | | | | | “TFE3_NG5.1”; exon “1”; |
| chr13 | transcript | 113322717 | 113334602 | − | gene_id “TFE3_NG6”; transcript_id |
| | | | | | “TFE3_NG6.1”; RPKM “12.1953”; cov |
| | | | | | “176.9991”; |
| chr13 | exon | 113322717 | 113333337 | − | gene_id “TFE3_NG6”; transcript_id |
| | | | | | “TFE3_NG6.1”; exon “1”; |
| chr13 | exon | 113333577 | 113334602 | − | gene_id “TFE3_NG6”; transcript_id |
| | | | | | “TFE3_NG6.1”; exon “2”; |
| chr13 | transcript | 113322717 | 113334602 | − | gene_id “TFE3_NG6”; transcript_id |
| | | | | | “TFE3_NG6.2”; RPKM “7.8941”; cov |
| | | | | | “114.5728”; |
| chr13 | exon | 113322717 | 113325637 | − | gene_id “TFE3_NG6”; transcript_id |
| | | | | | “TFE3_NG6.2”; exon “1”; |
| chr13 | exon | 113326747 | 113333337 | − | gene_id “TFE3_NG6”; transcript_id |
| | | | | | “TFE3_NG6.2”; exon “2”; |
| chr13 | exon | 113333577 | 113334602 | − | gene_id “TFE3_NG6”; transcript_id |
| | | | | | “TFE3_NG6.2”; exon “3”; |
| chr13 | transcript | 113322717 | 113334602 | − | gene_id “TFE3_NG6”; transcript_id |
| | | | | | “TFE3_NG6.3”; RPKM “6.3242”; cov |
| | | | | | “91.7887”; |
| chr13 | exon | 113322717 | 113325637 | − | gene_id “TFE3_NG6”; transcript_id |
| | | | | | “TFE3_NG6.3”; exon “1”; |
| chr13 | exon | 113326747 | 113326811 | − | gene_id “TFE3_NG6”; transcript_id |
| | | | | | “TFE3_NG6.3”; exon “2”; |
| chr13 | exon | 113329517 | 113329587 | − | gene_id “TFE3_NG6”; transcript_id |
| | | | | | “TFE3_NG6.3”; exon “3”; |
| chr13 | exon | 113332861 | 113333337 | − | gene_id “TFE3_NG6”; transcript_id |
| | | | | | “TFE3_NG6.3”; exon “4”; |
| chr13 | exon | 113333513 | 113334602 | − | gene_id “TFE3_NG6”; transcript_id |
| | | | | | “TFE3_NG6.3”; exon “5”; |
| chr13 | transcript | 113322717 | 113334602 | − | gene_id “TFE3_NG6”; transcript_id |
| | | | | | “TFE3_NG6.4”; RPKM “5.0608”; cov |
| | | | | | “73.4520”; |
| chr13 | exon | 113322717 | 113325637 | − | gene_id “TFE3_NG6”; transcript_id |
| | | | | | “TFE3_NG6.4”; exon “1”; |
| chr13 | exon | 113329517 | 113329587 | − | gene_id “TFE3_NG6”; transcript_id |
| | | | | | “TFE3_NG6.4”; exon “2”; |
| chr13 | exon | 113332861 | 113333337 | − | gene_id “TFE3_NG6”; transcript_id |
| | | | | | “TFE3_NG6.4”; exon “3”; |
| chr13 | exon | 113333513 | 113334602 | − | gene_id “TFE3_NG6”; transcript_id |
| | | | | | “TFE3_NG6.4”; exon “4”; |
| chr16 | transcript | 20547676 | 20548684 | + | gene_id “TFE3_NG7”; transcript_id |
| | | | | | “TFE3_NG7.1”; RPKM “9.1675”; cov |
| | | | | | “133.0555”; |
| chr1 6 | exon | 20547676 | 20548684 | + | gene_id “TFE3_NG7”; transcript_id |
| | | | | | “TFE3_NG7.1”; exon “1”; |
| chr17 | transcript | 17336544 | 17344732 | + | gene_id “TFE3_NG8”; transcript_id |
| | | | | | “TFE3_NG8.1”; RPKM “24.3878”; cov |
| | | | | | “353.9585”; |
| chr17 | exon | 17336544 | 17336592 | + | gene_id “TFE3_NG8”; transcript_id |
| | | | | | “TFE3_NG8.1”; exon “1”; |
| chr17 | exon | 17338690 | 17338847 | + | gene_id “TFE3_NG8”; transcript_id |
| | | | | | “TFE3_NG8.1”; exon “2”; |
| chr17 | exon | 17342707 | 17344732 | + | gene_id “TFE3_NG8”; transcript_id |
| | | | | | “TFE3_NG8.1”; exon “3”; |
| chr17 | transcript | 17336544 | 17344732 | + | gene_id “TFE3_NG8”; transcript_id |
| | | | | | “TFE3_NG8.2”; RPKM “5.9317”; cov |
| | | | | | “86.0914”; |
| chr17 | exon | 17336544 | 17336628 | + | gene_id “TFE3_NG8”; transcript_id |
| | | | | | “TFE3_NG8.2”; exon “1”; |
| chr17 | exon | 17338690 | 17338847 | + | gene_id “TFE3_NG8”; transcript_id |
| | | | | | “TFE3_NG8.2”; exon “2”; |
| chr17 | exon | 17342707 | 17344732 | + | gene_id “TFE3_NG8”; transcript_id |
| | | | | | “TFE3_NG8.2”; exon “3”; |
| chr17 | transcript | 17336544 | 17344732 | + | gene_id “TFE3_NG8”; transcript_id |
| | | | | | “TFE3_NG8.3”; RPKM “3.4443”; cov |
| | | | | | “49.9897”; |
| chr17 | exon | 17336544 | 17336592 | + | gene_id “TFE3_NG8”; transcript_id |
| | | | | | “TFE3_NG8.3”; exon “1”; |
| chr17 | exon | 17338690 | 17344732 | + | gene_id “TFE3_NG8”; transcript_id |
| | | | | | “TFE3_NG8.3”; exon “2”; |
| chr17 | transcript | 17336544 | 17344732 | + | gene_id “TFE3_NG8”; transcript_id |
| | | | | | “TFE3_NG8.4”; RPKM “1.1033”; cov |
| | | | | | “16.0131”; |
| chr17 | exon | 17336544 | 17336628 | + | gene_id “TFE3_NG8”; transcript_id |
| | | | | | “TFE3_NG8.4”; exon “1”; |
| chr17 | exon | 17338690 | 17344732 | + | gene_id “TFE3_NG8”; transcript_id |
| | | | | | “TFE3_NG8.4”; exon “2”; |
| chr17 | transcript | 17336544 | 17344732 | + | gene_id “TFE3_NG8”; transcript_id |
| | | | | | “TFE3_NG8.5”; RPKM “1.1118”; cov |
| | | | | | “16.1358”; |
| chr17 | exon | 17336544 | 17338847 | + | gene_id “TFE3_NG8”; transcript_id |
| | | | | | “TFE3_NG8.5”; exon “1”; |
| chr17 | exon | 17342707 | 17344732 | + | gene_id “TFE3_NG8”; transcript_id |
| | | | | | “TFE3_NG8.5”; exon “2”; |
| chr17 | transcript | 17336544 | 17344732 | + | gene_id “TFE3_NG8”; transcript_id |
| | | | | | “TFE3_NG8.6”; RPKM “4.2478”; cov |
| | | | | | “61.6512”; |
| chr17 | exon | 17336544 | 17344732 | + | gene_id “TFE3_NG8”; transcript_id |
| | | | | | “TFE3_NG8.6”; exon “1”; |
| chr17 | transcript | 80292461 | 80297873 | − | gene_id “TFE3_NG9”; transcript_id |
| | | | | | “TFE3_NG9.1”; RPKM “23.1051”; cov |
| | | | | | “335.3425”; |
| chr17 | exon | 80292461 | 80297873 | − | gene_id “TFE3_NG9”; transcript_id |
| | | | | | “TFE3_NG9.1”; exon “1”; |
| chr17 | transcript | 80298264 | 80304802 | − | gene_id “TFE3_NG10”; transcript_id |
| | | | | | “TFE3_NG10.1”; RPKM “28.2359”; cov |
| | | | | | “409.8092”; |
| chr17 | exon | 80298264 | 80299053 | − | gene_id “TFE3_NG10”; transcript_id |
| | | | | | “TFE3_NG10.1”; exon “1”; |
| chr17 | exon | 80300274 | 80304802 | − | gene_id “TFE3_NG10”; transcript_id |
| | | | | | “TFE3_NG10.1”; exon “2”; |
| chr17 | transcript | 80298264 | 80304802 | − | gene_id “TFE3_NG10”; transcript_id |
| | | | | | “TFE3_NG10.2”; RPKM “12.7802”; cov |
| | | | | | “185.4884”; |
| chr17 | exon | 80298264 | 80304802 | − | gene_id “TFE3_NG10”; transcript_id |
| | | | | | “TFE3_NG10.2”; exon “1”; |
| chr18 | transcript | 33444806 | 33446227 | − | gene_id “TFE3_NG11”; transcript_id |
| | | | | | “TFE3_NG11.1”; RPKM “5.8396”; cov |
| | | | | | “84.7553”; |
| chr18 | exon | 33444806 | 33446227 | − | gene_id “TFE3_NG11”; transcript_id |
| | | | | | “TFE3_NG11.1”; exon “1”; |
| chr18 | transcript | 60755402 | 60759211 | + | gene_id “TFE3_NG12”; transcript_id |
| | | | | | “TFE3_NG12.1”; RPKM “1.3508”; cov |
| | | | | | “19.6058”; |
| chr18 | exon | 60755402 | 60756131 | + | gene_id “TFE3_NG12”; transcript_id |
| | | | | | “TFE3_NG12.1”; exon “1”; |
| chr18 | exon | 60757568 | 60759211 | + | gene_id “TFE3_NG12”; transcript_id |
| | | | | | “TFE3_NG12.1”; exon “2”; |
| chr18 | transcript | 60755402 | 60769670 | + | gene_id “TFE3_NG12”; transcript_id |
| | | | | | “TFE3_NG12.2”; RPKM “4.9223”; cov |
| | | | | | “71.4404”; |
| chr18 | exon | 60755402 | 60756131 | + | gene_id “TFE3_NG12”; transcript_id |
| | | | | | “TFE3_NG12.2”; exon “1”; |
| chr18 | exon | 60757568 | 60757670 | + | gene_id “TFE3_NG12”; transcript_id |
| | | | | | “TFE3_NG12.2”; exon “2”; |
| chr18 | exon | 60763246 | 60769670 | + | gene_id “TFE3_NG12”; transcript_id |
| | | | | | “TFE3_NG12.2”; exon “3”; |
| chr2 | transcript | 41605975 | 41606187 | + | gene_id “TFE3_NG3”; transcript_id |
| | | | | | “TFE3_NG3.1”; RPKM “14.8287”; cov |
| | | | | | “215.2207”; |
| chr2 | exon | 41605975 | 41606187 | + | gene_id “TFE3_NG3”; transcript_id |
| | | | | | “TFE3_NG3.1”; exon “1”; |
| chr2 | transcript | 41606478 | 41606776 | + | gene_id “TFE3_NG4”; transcript_id |
| | | | | | “TFE3_NG4.1”; RPKM “16.3155”; cov |
| | | | | | “236.7987”; |
| chr2 | exon | 41606478 | 41606776 | + | gene_id “TFE3_NG4”; transcript_id |
| | | | | | “TFE3_NG4.1”; exon “1”; |
| chr20 | transcript | 7391956 | 7400603 | + | gene_id “TFE3_NG13”; transcript_id |
| | | | | | “TFE3_NG13.1”; RPKM “1.7134”; cov |
| | | | | | “24.8678”; |
| chr20 | exon | 7391956 | 7392062 | + | gene_id “TFE3_NG13”; transcript_id |
| | | | | | “TFE3_NG13.1”; exon “1”; |
| chr20 | exon | 7397768 | 7400603 | + | gene_id “TFE3_NG13”; transcript_id |
| | | | | | “TFE3_NG13.1”; exon “2”; |
| chr20 | transcript | 7391956 | 7400603 | + | gene_id “TFE3_NG13”; transcript_id |
| | | | | | “TFE3_NG13.2”; RPKM “7.7831”; cov |
| | | | | | “112.9625”; |
| chr20 | exon | 7391956 | 7392057 | + | gene_id “TFE3_NG13”; transcript_id |
| | | | | | “TFE3_NG13.2”; exon “1”; |
| chr20 | exon | 7397768 | 7400603 | + | gene_id “TFE3_NG13”; transcript_id |
| | | | | | “TFE3_NG13.2”; exon “2”; |
| chr20 | transcript | 7391956 | 7410806 | + | gene_id “TFE3_NG13”; transcript_id |
| | | | | | “TFE3_NG13.3”; RPKM “1.8293”; cov |
| | | | | | “26.5495”; |
| chr20 | exon | 7391956 | 7392057 | + | gene_id “TFE3_NG13”; transcript_id |
| | | | | | “TFE3_NG13.3”; exon “1”; |
| chr20 | exon | 7397768 | 7397871 | + | gene_id “TFE3_NG13”; transcript_id |
| | | | | | “TFE3_NG13.3”; exon “2”; |
| chr20 | exon | 7401921 | 7410806 | + | gene_id “TFE3_NG13”; transcript_id |
| | | | | | “TFE3_NG13.3”; exon “3”; |
| chr22 | transcript | 50920076 | 50923291 | − | gene_id “TFE3_NG14”; transcript_id |
| | | | | | “TFE3_NG14.1”; RPKM “0.7608”; cov |
| | | | | | “11.0419”; |
| chr22 | exon | 50920076 | 50922308 | − | gene_id “TFE3_NG14”; transcript_id |
| | | | | | “TFE3_NG14.1”; exon “1”; |
| chr22 | exon | 50922639 | 50923291 | − | gene_id “TFE3_NG14”; transcript_id |
| | | | | | “TFE3_NG14.1”; exon “2”; |
| chrX | transcript | 74846065 | 74857308 | − | gene_id “TFE3_NG15”; transcript_id |
| | | | | | “TFE3_NG15.1”; RPKM “0.7409”; cov |
| | | | | | “10.7529”; |
| chrX | exon | 74846065 | 74851850 | − | gene_id “TFE3_NG15”; transcript_id |
| | | | | | “TFE3_NG15.1”; exon “1”; |
| chrX | exon | 74856976 | 74857308 | − | gene_id “TFE3_NG15”; transcript_id |
| | | | | | “TFE3_NG15.1”; exon “2”; |
| chrX | transcript | 74846065 | 74857308 | − | gene_id “TFE3_NG15”; transcript_id |
| | | | | | “TFE3_NG15.2”; RPKM “3.0723”; cov |
| | | | | | “44.5905”; |
| chrX | exon | 74846065 | 74851854 | − | gene_id “TFE3_NG15”; transcript_id |
| | | | | | “TFE3_NG15.2”; exon “1”; |
| chrX | exon | 74856976 | 74857308 | − | gene_id “TFE3_NG15”; transcript_id |
| | | | | | “TFE3_NG15.2”; exon “2”; |
| chrX | transcript | 74846065 | 74857308 | − | gene_id “TFE3_NG15”; transcript_id |
| | | | | | “TFE3_NG15.3”; RPKM “13.9975”; cov |
| | | | | | “203.1562”; |
| chrX | exon | 74846065 | 74857308 | − | gene_id “TFE3_NG15”; transcript_id |
| | | | | | “TFE3_NG15.3”; exon “1”; |
| chr1 | transcript | 9158343 | 9163247 | + | gene_id “TMFI_NG1”; transcript_id |
| | | | | | “TMFI_NG1.1”; RPKM “3.0798”; cov |
| | | | | | “53.0276”; |
| chr1 | exon | 9158343 | 9163247 | + | gene_id “TMFI_NG1”; transcript_id |
| | | | | | “TMFI_NG1.1”; exon “1”; |
| chr10 | transcript | 44280423 | 44289869 | − | gene_id “TMFI_NG5”; transcript_id |
| | | | | | “TMFI_NG5.1”; RPKM “1.1567”; cov |
| | | | | | “19.9166”; |
| chr10 | exon | 44280423 | 44280632 | − | gene_id “TMFI_NG5”; transcript_id |
| | | | | | “TMFI_NG5.1”; exon “1”; |
| chr10 | exon | 44280757 | 44281632 | − | gene_id “TMFI_NG5”; transcript_id |
| | | | | | “TMFI_NG5.1”; exon “2”; |
| chr10 | exon | 44289425 | 44289869 | − | gene_id “TMFI_NG5”; transcript_id |
| | | | | | “TMFI_NG5.1”; exon “3”; |
| chr10 | transcript | 44280423 | 44289869 | − | gene_id “TMFI_NG5”; transcript_id |
| | | | | | “TMFI_NG5.2”; RPKM “1.3729”; cov |
| | | | | | “23.6389”; |
| chr10 | exon | 44280423 | 44280632 | − | gene_id “TMFI_NG5”; transcript_id |
| | | | | | “TMFI_NG5.2”; exon “1”; |
| chr10 | exon | 44280757 | 44281632 | − | gene_id “TMFI_NG5”; transcript_id |
| | | | | | “TMFI_NG5.2”; exon “2”; |
| chr10 | exon | 44289161 | 44289869 | − | gene_id “TMFI_NG5”; transcript_id |
| | | | | | “TMFI_NG5.2”; exon “3”; |
| chr14 | transcript | 23355271 | 23356086 | + | gene_id “TMFI_NG1.1”; transcript_id |
| | | | | | “TMFI_gene.21900.1.0”; RPKM |
| | | | | | “0.1602”; cov “2.7582”; |
| chr14 | exon | 23355271 | 23355440 | + | gene_id “TMFI_NG1.1”; transcript_id |
| | | | | | “TMFI_gene.21900.1.0”; exon “1”; |
| chr14 | exon | 23355823 | 23356086 | + | gene_id “TMFI_NG1.1”; transcript_id |
| | | | | | “TMFI_gene.21900.1.0”; exon “2”; |
| chr14 | transcript | 23743275 | 23754199 | − | gene_id “TMFI_NG1.1”; transcript_id |
| | | | | | “TMFI_gene.21920.1.0”; RPKM |
| | | | | | “0.3807”; cov “6.5557”; |
| chr14 | exon | 23743275 | 23746396 | − | gene_id “TMFI_NG1.1”; transcript_id |
| | | | | | “TMFI_gene.21920.1.0”; exon “1”; |
| chr14 | exon | 23754107 | 23754199 | − | gene_id “TMFI_NG1.1”; transcript_id |
| | | | | | “TMFI_gene.21920.1.0”; exon “2”; |
| chr14 | transcript | 23743275 | 23755321 | − | gene_id “TMFI_NG1.1”; transcript_id |
| | | | | | “TMFI_gene.21920.1.2”; RPKM |
| | | | | | “0.5820”; cov “10.0210”; |
| chr14 | exon | 23743275 | 23746396 | − | gene_id “TMFI_NG1.1”; transcript_id |
| | | | | | “TMFI_gene.21920.1.2”; exon “1”; |
| chr14 | exon | 23755122 | 23755321 | − | gene_id “TMFI_NG1.1”; transcript_id |
| | | | | | “TMFI_gene.21920.1.2”; exon “2”; |
| chr18 | transcript | 27452992 | 27474842 | + | gene_id “TMFI_NG6”; transcript_id |
| | | | | | “TMFI_NG6.1”; RPKM “21.5395”; cov |
| | | | | | “370.8664”; |
| chr18 | exon | 27452992 | 27453200 | + | gene_id “TMFI_NG6”; transcript_id |
| | | | | | “TMFI_NG6.1”; exon “1”; |
| chr18 | exon | 27453299 | 27474842 | + | gene_id “TMFI_NG6”; transcript_id |
| | | | | | “TMFI_NG6.1”; exon “2”; |
| chr18 | transcript | 27452992 | 27474842 | + | gene_id “TMFI_NG6”; transcript_id |
| | | | | | “TMFI_NG6.2”; RPKM “19.4384”; cov |
| | | | | | “334.6911”; |
| chr18 | exon | 27452992 | 27474842 | + | gene_id “TMFI_NG6”; transcript_id |
| | | | | | “TMFI_NG6.2”; exon “1”; |
| chr2 | transcript | 30393847 | 30406047 | − | gene_id “TMFI_NG2”; transcript_id |
| | | | | | “TMFI_NG2.2”; RPKM “2.6920”; cov |
| | | | | | “46.3504”; |
| chr2 | exon | 30393847 | 30406047 | − | gene_id “TMFI_NG2”; transcript_id |
| | | | | | “TMFI_NG2.2”; exon “1”; |
| chr2 | transcript | 30393847 | 30407124 | − | gene_id “TMFI_NG2”; transcript_id |
| | | | | | “TMFI_NG2.3”; RPKM “1.3154”; cov |
| | | | | | “22.6486”; |
| chr2 | exon | 30393847 | 30404344 | − | gene_id “TMFI_NG2”; transcript_id |
| | | | | | “TMFI_NG2.3”; exon “1”; |
| chr2 | exon | 30406850 | 30407124 | − | gene_id “TMFI_NG2”; transcript_id |
| | | | | | “TMFI_NG2.3”; exon “2”; |
| chr2 | transcript | 30406201 | 30407124 | − | gene_id “TMFI_NG2”; transcript_id |
| | | | | | “TMFI_NG2.1”; RPKM “2.6356”; cov |
| | | | | | “45.3806”; |
| chr2 | exon | 30406201 | 30407124 | − | gene_id “TMFI_NG2”; transcript_id |
| | | | | | “TMFI_NG2.1”; exon “1”; |
| chr9 | transcript | 137513888 | 137514341 | − | gene_id “TMFI_NG3”; transcript_id |
| | | | | | “TMFI_NG3.1”; RPKM “3.1922”; cov |
| | | | | | “54.9626”; |
| chr9 | exon | 137513888 | 137514341 | − | gene_id “TMFI_NG3”; transcript_id |
| | | | | | “TMFI_NG3.1”; exon “1”; |
| chr9 | transcript | 137514674 | 137516981 | − | gene_id “TMFI_NG4”; transcript_id |
| | | | | | “TMFI_NG4.1”; RPKM “3.4731”; cov |
| | | | | | “59.7998”; |
| chr9 | exon | 137514674 | 137516981 | − | gene_id “TMFI_NG4”; transcript_id |
| | | | | | “TMFI_NG4.1”; exon “1”; |

Legends are as follow. Chromosome (number of the chromosome); source: GTF data from reference-based transcript assembler “Scallop”; feature: transcript or exon (each transcript is composed of one or more exons, the standard order in the table is the transcript and then its one or more exon components); start; beginning of the transcript or exon; end: end of the transcript or exon; DNA strand + or −; attributes:
for the transcripts: gene_id (gene name), transcript_id (name/reference of the transcript), RPKM (expression value as defined in the present application), coverage (coverage value)
for the exons: gene_id (gene name), transcript_id (name of the transcript), exon (exon No).
It is to be noted that the source are GTF data from reference-based transcript assembler “Scallop” for all transcripts and the score is 1000 for all.

### FIGURES

[0358] FIG. 1. EWS-FLI1 regulates Ewing specific neogenes.

[0359] (A) Scheme of the genomic region of the JUTE 1 gene. From top to bottom: a XX GGAA microsatellite is indicated, ChiP-seq of EWS-FLI1 in EWS-FLI1high and EWS-FLI1low conditions, H3K27ac and H3K4me3 in the same EWS-FLI1high and EWS-FLI1low conditions as well as short read RNA-seq alignments of the A673/TR/shEF in + and − DOX conditions and of three different Ewing tumors.

[0360] (B) RT-PCR analysis of the expression of the four neo-transcripts in the A673/TR/shEF cell line in EWS-FLI1high (DOX−) and EWS-FLI1low (DOX+) conditions.

[0361] (C) RT-PCR analysis of the expression of the four neo-transcripts in wild type and EWS-FLI1-expressing MSCs.

[0362] (D) Expression of JUJE 1 in cancers (TCGA and institutional databases). TPM: transcripts per million.

[0363] (E) Expression of JUJE 1 in tissues (GTEx, TCGA, HPA databases).

[0364] FIG. 2. Discovery of Ewing specific neogenes from short-read RNA-seq data.

[0365] (A) Overview of the neogene discovery pipeline (cf Methods for details).

[0366] (B) Modulation of neogene expression by EWS-FLI1 in 10 Ewing cell lines and MSCs. Size of the bubbles shows mean expression level in log 10 TPM of neogenes in Ewing cell lines with baseline EWS-FLI1 expression or MSCs expressing EWS-FLI1 (EF high), capped at 100 TPM. Color represents the log 2 fold-change (capped at 6) of mean neogene expression levels in EF high cell lines versus in corresponding cell lines with downregulated expression of EWS-FLI1, or MSCs not expressing EWS-FLI1 (EF low). Number of replicates per condition are: n=4 for TC71; n=3 for ASP14, MSC; n=2 for A673, CHLA10, EW1, EW24 and MHH-ES1; n=1 for EW7, POE and SK-N-MC.

[0367] FIG. 3. Discovery of neogenes specific for alveolar rhabdomyosarcoma (aRMS) and desmoplastic small round cell tumor (DSRCT).

[0368] (A) Modulation of aRMS-specific neogene expression by PAX3-FOXO1 in aRMS RH4 cell line. Size of the bubbles shows expression level in log 10 TPM of neogenes in RH4 with baseline PAX3-FOXO1 expression (PF high). Color represents the log 2 fold-change of neogene expression level in PF high RH4 versus in RH4 with downregulated expression of PAX3-FOXO1 (PF low). n=1 replicate per condition.

[0369] (B) Modulation of DSRCT-specific neogene expression by EWS-WT1 in DSRCT cell lines. Size of the bubbles shows mean expression level in log 10 TPM of neogenes in cell lines with baseline EWS-WT1 expression (EW high). Color represents the log 2 fold-change of neogene expression level in EW high cell lines versus in cell lines with downregulated expression of EWS-WT1 (EW low). n=3 replicates per condition for both cell lines.

[0370] FIG. 4: Exemple of tetramer analysis and phenotypic characterization of a peptide derived from an EWS-FLI1-regulated lincRNA in lymphocyte from a healthy donor. A, principle of the teramer analysis; B, identification of tetramer-bound T cells; C, characterization of the naïve/memory phenotype.

[0371] FIG. 5: T cell clone sensibility. Cytokine secretion of CD8 T cells specific for peptides encoded by EWS-FLI1-regulated lincRNAs (initially identified by PacBio sequencing) in response to increasing concentration of their specific antigen presented by the K562 cell antigen presenting cells.

### EXAMPLES

### Experimental Procedures

[0372] Cell Culture

[0373] A673/TR/shEF (also called ASP14) cell line (Carrillo et al., 2007) was routinely checked by PCR for the absence of mycoplasma. A673/TR/shEF cell line was cultured at 37° C., in 5% CO² with Dulbecco's Modified Eagle Medium DMEM with High Glucose, 4 mM of L-Glutamine, 4500 mg/L Glucose and sodium pyruvate (HyClone) supplemented with 10% FBS (Eurobio) and 1% antibiotics (v/v) (penicillin and streptomycin (Gibco)). Induction of EWS-FLI1 specific shRNA was performed by adding 1 μg/mL of doxycycline in the medium ex-tempo. After seven days of treatment, doxycycline was removed and cells were washed three times to stop the shRNA induction, thus enabling re-expression of EWS-FLI1.

[0374] RNA from MSCs expressing or not EWS-FLI1 has been obtained from Stamenkovic lab.

[0375] RNA Extraction and Reverse Transcriptase

[0376] From cell extract: Total RNA was isolated using the Nucleospin II kit (Macherey-Nagel) and reverse-transcribed using the High-Capacity cDNA Reverse Transcription kit (Applied Biosystems). Next, cDNA molecules were amplified by PCR performed using the AmpliTaqGold DNA Polymerase kit with Gold Buffer and MgCl2 (Applied Biosystems). One microgram of template total RNA was used for each reaction.

[0377] From polysome profiling fraction: gradient fractions were collected in 16 tubes. Equal RNA volumes (300 μL) of each gradient fraction were used for RT using the iScript cDNA Synthesis Kit (BioRad).

[0378] Next, cDNA molecules were amplified by qPCR performed using SYBR Green (Applied Biosystems). Reactions were run on 7500 QPCR instrument and analyzed using the 7500 system SDS software (Applied Biosystems). Relative quantification of neotranscripts was normalized to an endogenous control (RPLPO) and was performed using the comparative Ct method. Error bars indicate SD. Oligonucleotides were purchased from MWG Eurofins Genomics.

EWS-FLI1 primers:
F: GCCAAGCTCCAAGTCAATATAGC/
R: GAGGCCAGAATTCATGTTATTGC
RPLP0 primers:
F: GAAACTCTGCATTCTCGCTTC/
R: GGTGTAATCCGTCTCCACAG.
Primer JUJE1:
F: ATACTGGGCTTGCAACTGGAG/
R: TCCTCCTTGGAATGAATGGGC.
Primer JUJE2:
F: TGGCCAATTGGAGGGTCTTC/
R: GCAAATTACATCCTCATTTCTCCA.
Primer JUJE3:
F: ACAGCACTGCTAGATTAGGGAA/
R: CAGTGCAAGCCCTCGAATGTC.
Primer JUJE10:
F: ACTTTCCTTTCTCCTCACCACC/
R: AGACATCCTAAAGTAACAGAGGCA.

[0379] RNA Seq (Illumina & PacBio) & Data Processing

[0380] Illumina:

[0381] Every RNA samples were evaluated for integrity using BioAnalyzer instrument (Agilent). All samples displayed excellent quality (RNA Integrity Number above 9). Libraries were performed using the TruSeq Stranded mRNA Library Preparation Kit. Equimolar pools of libraries were sequenced on an Illumina HiSeq 2500 machine using paired-ends reads (PE, 2×101 bp) and High Output run mode allowing to get around 200 million of raw reads per sample. Raw reads were mapped on the human reference genome hg19 using the STAR aligner (v.2.5.0a). PCR-duplicated reads and low mapping quality reads (MQ<20) were removed using Picard tools and SAMtools, respectively.

[0382] Pacbio:

[0383] Libraries have been prepared following the protocol from Pacific Biosciences: “Procedure & Checklist—Iso-Seg™ Template Preparation for Sequel® Systems—Version 5 (November 2017)”

[0384] 1 ug of totalRNA has been used as input. The cDNA has been synthetized with the SMARTer PCR cDNA Synthesis Kit from Clontech, following manufacturer's recommendations. Then the cDNA was amplified with the PrimeSTAR GXL DNA Polymerase from Clontech with 12 cycles of PCR. This number has been set up after PCR optimization, in order to obtain enough yield, and to avoid PCR bias. The amplified cDNA was then split into only 2 fractions to perfom 2 different purifications using AMPure beads (ratio of 0.4× and 1×). No 3rd fraction was isolated to perform a size-selection step using Blue Pippin system. Then an equimolar pool was made from the 2 fractions. The SMRTbell has been prepared from 2.8 ug of this equimolar pool of cDNA using the SMRTbell Template Prep Kit from Pacific Biosciences, following manufacturer's recommendations. The sequencing was performed on Sequel system, using V2.1 chemistry and Magbead loading. 4 SMRTcells have been used for the ASP14 sample and 3 SMRTcells for the ASP14+DOX sample. The sequencing runs were set up with a pre-extension step of 240 min and 10 hours of movie. We used the implemented pbsmrtpipe pipeline to perform read processing.

[0385] To annotate IsoSeq reads, we used MatchAnnot script (https://github.com/TomSkelly/MatchAnnot). MatchAnnot assign each read to transcripts annotation using score base-pair matching. Reads that have no match on the Gencode v19 reference are annotated as NA. We manually curated the list of NA reads (n=145) using Integrative Genomics Viewer (IGV). We also used Illumina RNAseq data, ChIPseq data (EWS-FLI1, H3K27me3, H3K27ac, H3K4me3) and GGAA repeats track at the same time in order to identify EWS-FLI1-regulated reads from intergenic region. After applying these filters, we found 4 clusters corresponding to four distinct expressed-intergenic regions.

[0386] JUJE Neotranscripts Quantification

[0387] Public fastq files from TCGA, GTEx and HPA dataset were downloaded and aligned to the hg19 genome assembly using STAR version 2.7.0e (Dobin et al, 2013). The GTF file used for alignment and quantification of gene expression was based on evidence-based annotation of the human genome (GRCh37), version 19 (Ensembl 74) provided by GENCODE, to which was added the information for the 4 neotranscripts, previously described, in GTF format. Gene expression was quantified using the GeneCounts procedure from STAR. Raw counts were then normalized to Transcripts Per Million (TPM).

[0388] Tumor RNA-Seq Used for Discovery of Neogenes

[0389] Paired-end RNA-seq from the institutional database (Institut Curie) of fresh-frozen patient tumor tissue were used to search for tumor-specific neogenes. RNA-seq sequencing was performed using established protocols on Illumina instruments. 31 types of cancers, for which the inventors had at least 4 RNA-seq samples were tested, including 20 fusion-driven cancers. All diagnoses were made by pathological examination, confirmed by fusion gene detection in the case of fusion-driven cancers and independently reviewed by an expert clinician. In detail, the inventors assessed the following diseases (abbreviations for neogene nomenclature in parentheses): 20 fusion-driven cancers including Ewing sarcoma (Ew), alveolar rhabdomyosarcoma (aRMS), desmoplastic small round cell tumor (DSRCT), BCOR-rearranged sarcoma (BCOR), CIC-fused sarcoma (CIC), clear cell sarcoma (CCS), EWSR1-NFATC2 sarcoma (NFAT), synovial sarcoma (SS), angiomatoid fibrous histiocytoma (AFH), alveolar soft part sarcoma (ASPS), congenital fibrosarcoma (CFS), extraskeletal myxoid chondrosarcoma (emCS), low-grade fibromyxoid sarcoma (LGFS), mesenchymal chondrosarcoma (MCS), midline carcinoma (Midline), myxoid liposarcoma (mLPS), EWSR1-PATZ1 sarcoma (PATZ1), solitary fibrous tumor (SFT), TFE3 renal cell carcinoma (TFE3), inflammatory myofibroblastic tumor (TMFI); 11 non-fusion driven cancers including atypical teratoid rhabdoid tumor (ATRT), desmoid tumor (Desmoid), embryonal rhabdomyosarcoma (eRMS), leiomyosarcoma (LMS), dedifferentiated liposarcoma (LPS), malignant peripheral nerve sheath tumor (MPNST), nephroblastoma (NEP), neuroblastoma (NEU), osteosarcoma (OST), small cell carcinoma of the ovary hypercalcemic type (SCCOHT) and undifferentiated pleomorphic sarcoma (UPS). For discovery of neogenes, the inventors initially ran the pipeline on the first 8 fusion-driven sarcomas in the list («discovery batch 1») before testing the 23 other cancers («discovery batch 2»).

[0390] RNA-Seq Alignment, Transcript Assembly and Detection of Unannotated Transcripts

[0391] The inventors used Scallop (Shao M, Kingsford C. Accurate assembly of transcripts through phase-preserving graph decomposition. Nat Biotechnol. 2017 December; 35(12):1167-1169), a reference-based transcript assembler, to predict all transcript sequences based on aligned RNA-seq reads, independently of a reference transcriptome annotation. First, paired-end FASTQ files were aligned to the hg19 human reference genome using STAR v2.7.0 (Dobin et al., Bioinformatics 2013). They then ran Scallop on the resulting BAM file with default parameters to assemble all expressed transcript sequences. To conserve only unannotated transcripts, they used Gffcompare (Pertea and Pertea, F1000 Research 2020) to compare the Scallop output GTF file with the reference GENCODE v19 GTF file, and conserved only transcripts labeled by Gffcompare as «u» (unknown, intergenic), «y» (contains a reference within its introns) and «x» (exonic overlap on the opposite strand). Finally, to remove lowly expressed transcripts and decrease the rate of false positives, they removed all transcripts with coverage less than 10 as output by Scallop.

[0392] Selection of Tumor-Specific Unannotated Transcripts

[0393] To discover tumor-specific neogenes and discard all other transcripts assembled by Scallop, three steps of selection were used.

[0394] 1. First, the inventors ran Scallop as described previously on one RNA-seq sample of the cancer of interest to generate a first set of candidate unannotated transcripts (Candidate set 1).

[0395] 2. Then they applied a first filtering process based on high and tumor-specific expression as compared to a limited set of other tumors: for this they quantified the expression of Candidate set 1 neogenes on 3 samples from each cancer type (24 samples of 8 types in «discovery batch 1» and 69 samples of 23 types in «discovery batch 2») by re-aligning each sample with STAR and quantifying expression using the GeneCounts procedure with the GENCODE v19 reference GTF file to which they added the Candidate set 1 neotranscripts. Raw counts were converted to transcripts per million (TPM) before the filtering process. To retain only tumor-specific and highly expressed candidates, they selected transcripts with:

[0396] (i) mean expression in the disease of interest of more than 20 TPM,

[0397] (ii) log-fold change of mean expression in samples of other diagnoses versus mean expression in disease of interest of less than −2,

[0398] (iii) mean expression in samples of other diagnoses of less than 3 TPM,

[0399] (iv) maximum expression in samples of other diagnoses of less than 10 TPM,

[0400] resulting in a second set of candidate neogenes (Candidate set 2). As expression in this process was quantified with a unique GTF file containing all Candidate set 1 neogenes for batch 2 (23 tumor types), the first threshold for the filtering process in batch 2 was adapted to (i) mean expression in the disease of interest of more than 10 TPM (instead of 20). As more samples were used in the filtering process for batch 2 (69 versus 24 in batch 1), the fourth threshold was adapted to (iv) maximum expression in samples of another diagnosis of less than 15 TPM (instead of 10). Other thresholds were left unchanged for batch 2. For Ewing sarcoma, we also ran Scallop as described previously on one RNA-seq sample from a cell line (ASP14) and applied the same above filters to the resulting Candidate set 1 of neogenes. The resulting Candidate set 2 neogenes not overlapping Candidate set 2 neogenes from the Ewing tumor sample were included in the final Candidate set 2 neogenes used for the subsequent round of filtering.

[0401] 3. Finally, a second filtering step was applied based on expression levels across a wide range of cancers and normal tissues: for this we quantified expression of Candidate set 2 neogenes in all tumors from our institutional database, all cancer types from TCGA (either all the samples from one type or 50 samples if number of samples exceeded 50), all normal tissue samples from TCGA, all normal tissues from GTEx (either all the samples from one type or 50 samples if number of samples exceeded 50) and all normal tissue samples from the Human Protein Atlas. Every sample was re-aligned with STAR and expression quantified by the GeneCounts procedure with the use of a GTF file including GENCODE v19 and Candidate set 2 neotranscripts (one for each discovery batch). Raw counts were converted to TPM before filtering.

[0402] To retain tumor-specific candidates with a relatively high expression level (accounting for potentially lower tumor content in some samples the inventors diminished the first threshold (i) as compared to the first filter) and quasi-null expression in other cancers and normal tissues, they selected transcripts with:

[0403] (i) mean expression in the disease of interest of more than 7.5 TPM,

[0404] (ii) log-fold change of mean expression in other samples versus mean expression in disease of interest of less than −3,

[0405] (iii) mean expression in other samples of less than 2 TPM,

[0406] (iv) 99% quantile of expression in other samples of less than 10 TPM,

[0407] (v) maximum mean expression in another cancer or tissue of less than 10 TPM (excluding testis and placenta),

[0408] resulting in a final set of tumor-specific neogenes.

[0409] During the procedure they found that a large part of candidate neogenes were mutually and exclusively expressed in the following pairs of diagnoses: angiomatoid fibrous histiocytoma (AFH) and clear cell sarcoma (CCS), alveolar soft part sarcoma (ASPS) and TFE3 renal cell carcinoma (TFE3), alveolar rhabdomyosarcoma (aRMS) and embryonal rhabdomyosarcoma (eRMS). They did not remove those neogenes (cf Results) to account for neogenes driven by the same fusion gene in two different diseases (AFH/CCS, ASPS/TFE3) and disease-associated neogenes common to both types of rhabdomyosarcoma (aRMS/eRMS).

[0410] Analysis of Fusion Transcription Factor Binding and Histone Marks Around Neogenes

[0411] The inventors analyzed ChIP-seq data to explore the epigenetic landscape of neogenes in 3 fusion-driven sarcomas (Ewing, aRMS and DSRCT). For Ewing sarcoma, they used ChIP-seq data from our laboratory for EWS-FLI1, H3K27ac and H3K4me3 in the ASP14 cell line. For alveolar rhabdomyosarcoma, ChIP-seq from public data was used: H3K27ac, H3K4me3 (GSE83726 from Gryder et al., Cancer Discov 2017) and PAX3-FOXO1 (GSE19063 from Cao et al., Cancer Res 2010) for the RH4 cell line. For DSRCT, ChIP-seq from public data was used: EWS-WT1 and PolII (GSE156277 from Hingorani et al., Sci Rep 2020) for the JN-DSRCT-1 cell line. For public data, FASTQ files were downloaded from SRA and aligned with Bowtie2 v2.2.9 (Langmead and Salzberg, Nature Methods 2012), duplicates and multi-mapped reads were removed with Samtools (Li et al., Bioinformatics 2009).

[0412] Analysis of Expression of Neogenes in Cell Lines

[0413] For Ewing sarcoma, aRMS and DSRCT, the inventors quantified expression of neogenes in cell lines having normal or downregulated expression of the fusion transcript (respectively EWS-FLI1, PAX3-FOXO1 and EWS-WT1). RNA-seq reads were aligned with STAR using a GTF file containing GENCODE v19 and the corresponding neogenes, quantification was done using GeneCounts. For Ewing sarcoma, they used RNA-seq data from their laboratory for 10 cell lines having either normal expression of EWS-FLI1 at day 0 or downregulated expression by a doxycyclin-inducible system or siRNA after 7 days. They also used RNA-seq data for MSCs, some of which were induced to express EWS-FLI1. For aRMS, the inventors used RNA-seq from public data (GSE83724 from Gryder et al., Cancer Discov 2017) for the RH4 cell line treated with an shRNA against PAX3-FOXO1 for 48 hours or a control shRNA. For DSRCT, they used RNA-seq from public data (GSE137561 from Gedminas et al., Oncogenesis 2020) for BER and JN-DSRCT-1 cell lines treated with siRNA against EWS-WT1 for 48 hours or control siRNA. All FASTQ files from public data were downloaded from SRA.

[0414] Generation of Genomic-Browser Style Figures for Neogene Loci

[0415] Genomic browser-style figures showing neotranscript sequences, RNA-seq read alignments, and ChIP-seq data were generated with a custom script written in R (R Core Team, 2017). RNA-seq reads in FASTQ format were aligned to the hg19 human reference genome with STAR using a GENCODE v19 reference GTF annotation and visualized in BAM format. ChIP-seq BAM files used for visualization were generated as described previously. For Ewing sarcoma, GGAA repeats (EWS-FLI1 canonical binding sites) were also displayed in the same figure.

[0416] Peptide Prediction

[0417] For each transcript, open reading frames were identified using ORFfinder (https://www.ncbi.nlm.nih.gov/orffinder) in the three frames, with parameters “minimal ORF length”=75 nucleotides and “ORF start codon”=any.

[0418] Peptides binding to MHC Class 1 molecules were predicted using the NetMHCpan 4.1 suite (http://www.cbs.dtu.dk/services/NetMHCpan/), using “HLA allele”=A2, “peptide length”=8-11 and “rank threshold for strong binding”=0.5%.

[0419] Tetramer Preparation and Immunological Analyses

[0420] All experiments were conducted at the immunology department of Institut Curie. Peptides were synthetized by the GeneCust company and HLA-A*02:01/peptide monomers were prepared using the easYmer kit (immunAware, Denmark). After control of the affinity of monomers, tetramers were incubated with human CD8+ prepared from healthy controls (EasySep kit from STEMCELL technologies). Tetramer-CD8 cell binding and analysis of the bound CD8 populations (naïve or memory) was assessed by flow cytometry.

[0421] Results:

[0422] The inventors initially performed long-read RNA sequencing using the PacBio Iso-Seq protocol to investigate the full-length transcriptomic profile of the A673 Ewing cell line. A total of 15,576,646 raw sequence reads were generated, representing 40.3 Gbp. Using the pbsmtpipe pipeline (REF), 56,051 high-quality Circular Consensus Sequence (CCS) were kept for downstream analysis. Surprisingly, they identified 145 high-quality CCS (0.5%) that could be aligned to the human genome but had no match on the RefSeq database of human transcripts.

[0423] Manual inspection of each CCS identified 80 robust candidate neotranscripts. Other sequences were classified as mis-annotated genes (e.g. read-through transcription) or had low coverage support. They hypothesized that some of these transcripts may be generated by transcriptional activation by EWS-FLI1, the aberrant transcription factor specific for Ewing sarcoma. Under this hypothesis, such transcripts should fulfill the following criteria:
[0424] i) be regulated by EWS-FLI,
[0425] ii) demonstrate the presence of an EWS-FLI1 ChIP-seq peak as well as H3K27ac and H3K4me3 histone marks around their transcription start sites (TSS) and
[0426] iii) be expressed specifically in Ewing tumors.

[0427] Four highly confident neotranscripts (JUJE1, JUJE2, JUJE3 and JUJE10) were identified. The inventors found that EWS-FLI1 binds GGAA microsatellites located in close vicinity to their TSS 5 kb). This binding was furthermore associated with the presence of H3K27ac and H3K4me3 activation marks. Both marks were considerably decreased upon down-regulation of EWS-FLI1 by DOX treatment in the inducible A673/TR/shEF cell line (FIG. 1A). A specific RT-PCR assay further showed that these transcripts were correctly spliced and induced by EWS-FLI1 both in A673/TR/shEF cells (FIG. 1B) and in mesenchymal stem cells (MSC) stably expressing EWS-FLI1 (FIG. 1C).

[0428] These transcripts were highly expressed in Ewing sarcoma tumor biospecimens as quantified by Illumina short-read RNA-seq data (FIG. 1A). To more thoroughly investigate the specificity for Ewing sarcoma, the inventors appended these transcripts to the RefSeq dataset and realigned the GTEx, HPA and TCGA cohorts as well as their in-house collection of 132 Ewing sarcomas and 862 tumors of diverse diagnoses, mainly sarcomas. As shown in FIGS. 1D & E, while sporadic low-level expression of these transcripts could be observed in a limited number of tissues or tumors, these levels were much lower than the mean expression level observed in Ewing sarcoma.

[0429] These data show that Ewing sarcoma expresses specific transcripts induced by the binding of EWS-FLI1 within otherwise transcriptionally silent regions. As long-read PacBio sequencing has technical limitations with respect to clinical samples, the inventors designed a short-read strategy to explore in more depth the neotranscriptome of Ewing sarcoma based on genome-guided assembly (Shao and Kingsford, Nat Biotech 2017). Transcripts that were not annotated in the reference GENCODE transcriptome were retrieved. The expression of transcripts that were detected in three different Ewing sarcomas but not in 21 non-Ewing tumors was thoroughly explored across various databases of normal and tumor tissues (FIG. 2A, see expression thresholds in the Materials and Methods section). A total 61 Ewing-specific transcripts were thus identified. As some of these were derived from the same genomic loci through alternative splicing, they could be further assigned to 25 Ewing-specific neo-genes (Ew_NG)(data not shown). This set included the JUTE genes described above, except for JUJE3 which was filtered out as it corresponds to an annotated pseudogene in GENCODE, but not in RefSeq, which was used for filtering in the PacBio strategy. The inventors noted during this procedure (cf below) that some neogenes could be moderately expressed (most less than 10 TPM) in germinal tissues (testis and placenta), reflecting known higher transcriptomic diversity and exclusivity there (e.g. for cancer-testis antigens), and therefore allowed the few genes (less than 1.5% of neogenes in this study) expressed in these tissues at more than 10 TPM to pass the filter nonetheless. A total of 25 neogenes, corresponding to 61 neotranscripts were identified in Ewing sarcoma (data not shown).

[0430] The inventors then explored the suspected role of EWS-FLI1 in the expression of these Ew_NGs. They first used 10 separate Ewing cell lines with si- or shRNA targeting EWS-FLI to show that most Ew_NG were expressed in EWS-FLI1high conditions and down-regulated in EWS-FLI1low conditions (FIG. 2B). Similarly, while these genes were not expressed in MSC, the suspected cell-of-origin of Ewing sarcoma, most were strongly induced in EWS-FLI1-expressing MSC (FIG. 2C). They also took advantage of available EWS-FLI1 ChIP-seq data for Ewing cell lines to show that such EWS-FLI1 peaks situated on GGAA microsatellites were strongly enriched around TSS of several Ew_NGs (12/25) along with H2K27ac and H3K4me3 marks (data not shown). Altogether, these data strongly suggest that the aberrant transcription factor of Ewing sarcoma can bind specific regions in the genome and induce transcription of Ewing-specific neogenes.

[0431] The identification of EWS-FLI1-regulated neogenes in Ewing sarcoma and the validation of the short-read approach prompted the inventors to investigate other sarcomas characterized by the expression of chimeric transcription factors. Alveolar rhabdomyosarcoma (aRMS) and desmoplastic small round cell tumor (DSRCT) are sarcomas characterized by the expression of PAX3/7-FOXO1 and EWS-WT1 fusions, respectively. Using the same strategy of genome-guided assembly of RNA-seq from clinical samples (FIG. 2A) they identified 36 aRMS-specific neogenes (aRMS NG) corresponding to 72 aRMS-specific neotranscripts, and 37 DSRCT-specific neogenes (DSRCT NG) corresponding to 105 DSRCT-specific neotranscripts (data not shown).

[0432] Similarly to Ewing sarcoma, they explored the potential roles of chimeric transcription factors PAX3/7-FOXO1 and EWS-WT1 in the expression of these neogenes. For aRMS, they used RNA-seq data (Gryder et al., Cancer Discov 2017) performed in the RH4 cell line after treatment with an shRNA against PAX3-FOXO1 to show that 15/36 of the neogenes are expressed in this cell line and 7/15 are downregulated (log 2FC>2 in PAX-FOXO high versus low) upon knock-down of PAX3-FOXO1. They also explored ChIP-seq data for PAX3-FOXO1, H3K27ac and H3K4me3 in the same cell line (Gryder et al., Cancer Discov 2017) and found that PAX3-FOXO1 peaks were enriched at the TSS of 13/36 of these neogenes (FIG. 3A).

[0433] For DSRCT, the inventors took advantage of recent work using an siRNA against EWS-WT1 in BER and JN-DSRCT-1 cell lines (Gedminas et al., Oncogenesis 2020) to show that all but 2 neogenes were expressed in at least one cell line and that most (28/36) were strongly downregulated (log 2FC>2 in EWS-WT1 high versus low) upon repression of EWS-WT1 (FIG. 3B). They also analyzed ChIP-seq data for EWS-WT1 in JN-DSRCT-1 (Hingorani et al., Sci Rep 2020) to show a high enrichment of EWS-WT1 peaks around TSS of neogenes (25/37), as well as RNA Polymerase II modifications showing active transcription (data not shown).

[0434] Based on their observations in Ewing sarcoma, aRMS and DSRCT, the inventors propose the concept of fusion-driven neogenes, i.e. tumor-specific neogenes that

[0435] 1) are specifically associated with the fusion-driven tumor type,

[0436] 2) depend on the chimeric transcription factors, as shown by regulation of expression in cell lines with activity of the chimeric transcription factor, and

[0437] 3) have evidence of physical binding of the chimeric transcription factor near their TSS. Additional evidence is available for Ewing fusion-driven neogenes with presence of GGAA microsatellites in the binding sites for EWS-FLI1, as well as decreased chromatin activation marks in EWS-FLI low condition. Numbers of fusion-driven genes satisfying all criteria are 12/25 in Ewing sarcoma, 3/36 in aRMS and 16/37 in DSRCT (see Table 5 for details of classification).

[0438] A subset of neogenes depends on the chimeric transcription factor for expression in knock-down or over-expression experiments but lack clear evidence of binding by ChIP-seq. This may be due to many factors, including sensitivity of ChIP-seq, long-range regulatory interaction, or indirect regulation. The inventors thus consider such neogenes fusion-dependent.

[0439] Based on the detailed analysis in these three fusion-driven sarcomas, the inventors hypothesized that this mechanism of chimeric transcription factor-driven (or dependent) neogenes could be a recurrent phenomenon in fusion-driven sarcomas and other cancers. To test this hypothesis, they took advantage of our large institutional database of RNA-seq for sarcomas (FIG. 2A, Methods). They studied 238 cases of 17 additional types of fusion-driven cancer (all sarcomas except for midline carcinoma and TFE3 renal cell carcinoma). Analysis of this cohort (cf Methods), identified specific neogenes for all but congenital fibrosarcoma (data not shown), with between 2 and 47 tumor-specific neogenes per tumor type (table 6). Overall, the neogenes we identified are mostly multi-exonic, typically have consensus splice sites and do not show evidence of sequence conservation across vertebrates. As the inventors have only clinical samples for these types of cancer they cannot distinguish between fusion-driven, -dependent, and -associated neogenes. Interestingly, in their selection of tumor-specific neogenes, the inventors found that 5/15 neogenes found in clear cell sarcoma (CCS) were also highly expressed (mean TPM>10) in angiomatoid fibrous histiocytoma (AFH), and conversely 15/20 AFH neogenes were highly expressed in CCS. This sharing of neogenes in two types of tumors was also found for 7 neogenes in alveolar soft part sarcoma (ASPS) and TFE3 renal cell carcinoma (TFE3). These pairs of fusion-driven cancers share the same chimeric transcription factors in most cases (EWSR1-ATF1/CREB1 for AFH/CCS and ASPSCR1-TFE3 for ASPS/TFE3), strongly suggesting that the chimeric transcription factor is indeed a determining influence in the induction of these neogenes. Finally, it is noteworthy that fusion-driven cancers characterized by fusion genes not expressing chimeric sequence specific DNA-binding transcription factors, such as synovial sarcoma (SSX-SS18) and congenital fibrosarcoma (ETV6-NTRK3), have only 3 and 0 tumor-specific neogenes respectively, potentially because the chimeric transcription factor is not able to directly induce strictly fusion-driven neogenes in these cases.

[0440] The inventors believe that as in their 3 model sarcomas, part of the neogenes may be tumor-associated lncRNAs induced by a mechanism independent of the chimeric transcription factor (cf MiTranscriptome). However for fusion-driven cancers which have significantly more of these specific neogenes, they hypothesize that part of these neogenes may be chimeric transcription factor-driven or dependent, paralleling their observations in the 3 model sarcomas and extending this concept to all other fusion-driven cancers, at least those with chimeric DNA-binding transcription

[0441] Finally, open reading frames of the identified transcripts as above described were predicted and peptides predicted to be presented by the most MEW class 1 complex were synthetized for the JUJE transcripts (see tables 6-8).

[0442] Those neopeptides predicted to be presented in the context of the most frequent HLA-A2 molecule (tables 6-8) were further tested using the tetramer technology with synthetic peptides. Soluble dye-labelled tetramers.

[0443] Combined with synthesized candidate peptides were generated, assessed by flow-cytometry and then incubated with CD3+, CD8+ T cells. Double-positive T cells were further analysed using staining with CCR7 and CD45RA. This analysis showed that double positive naïve T-cells could be detected for most of the tested peptides.

[0444] FIG. 4 shows the principle of the tetramer approach and preliminary results obtained with a peptide derived from an ORF of a chromosome 10 EWS-FLI1-regulated lincRNA (i.e., an unannotated transcript specifically regulated by the EWS-FLI1 transcription factor fusion). Selected T cells were then expanded and tested in co-culture with professional Antigen Presenting cells (APCs) presenting the synthetized neopeptides. FIG. 5 shows cytokine secretion of CD8 T cells specific for the peptides (SEQ ID XX-XX) encoded by EWS-FLI1-regulated lincRNAs (initially identified by PacBio sequencing) in response to increasing concentration of their specific antigen, presented by the K562 cell antigen presenting cells. The results presented herein show that clones have responded to the synthetic neopeptide presentation (FIG. 5) at different concentrations.

[0445] Therefore the results provide evidence that neopeptides encoded by unannotated transcripts which expression is (i) regulated by a transcription factor fusion and (ii) specifically associated with the fusion-driven tumor type can not only be recognized by naïve T cells but that they can further drive their activation when presented by antigen presenting cells.

The application's sequence listing, which the Patent Office published only in electronic form, follows.

SEQUENCE LISTING (201 sequences)

SEQ ID NO: 1 - DNA, 2739 bp, Homo sapiens
agggagggaggcaggaacaaacgaatgtagaccaaaactgaaggtctacccctctggaacctgggagacttctgctcacaagttgtgctgctttggttccaggtagcaaaatgtcacaaaatggaaaaagagactgtcttcacacttcaacctgggacaagaacacgatgatggtcagcagaggacttcaggaaaagcttacttagaatttctcccaatgctggaaagcaatcatcgggaagagaggaagcatagacccccacatattctcctgatggccactggtacctctgactgcactgaagcagccccaagcagcatcctgggactcagcatcgagggagaactggcgtagtagagaagaacagaatgagctttctcaccgcagaggagtgaaaagccttgctttcgagacacttctggagacatcctaaagtaacagaggcagggctctggatgctctgcatagggaggtggtgaggagaaaggttggttttgtttcttcattttactttttttttttcaagagacaggatctcactctgtcacctaggctggagtgcagtggcaggatcatagctcactgcatctccaactcctgggctgaagcaatcctcctgcctcagcctccccagtagctgggactacaaatacaagccatcgtattcaggtaaaattttttattttattttatgtagagatagagtctcactacattgtccaggctggccttgaacttctggcctcaagagattctccacctcagcctcccaaagtacagggactacaggtgtgagctaccacttccagctaaagattgtcatttttaatgtgattccatttgtcctcccatgctaactcatgtaccttcatgtcacttggggaaatacaggtgacattatgcaacatttctgttttcttctttctaaaacagcagctaaatgtggttaagccattcttagcgacttctaagtttctaggaccaaagagtttctatgtattcaacgtatttacccacttggaagcacaaatatagccgattgatttatatattcctagtggtaatatttatagttaatgaaagcatcagacttcaattctttaaagctatttttccaggatggtaaaaatgattgctaatacgttatcttgttttagactacattttttcttgtcattgacaatgaaaatgtgcctgttttttatagagagcaagtttaaggagatgttttctatattcttaatttaattggtgattatataatcatctctcctctaagggaaccaatggcactgcgggttttttttttttttttcttattctctgaactaaactcctacaatcaaacaaagaggaggcaggacaaaagtgtctattcatttataagtaaaataaattgaaccttgacttattagaaaatgcaatttgagaatgaaaaattactttcttcacataatggcttggcatttctcatccttgcatacatctgtttcttttaaactcttagcttttaggccttggctgttttcattatatttagaaaaattgtcttcaattacatgaccccaaaccaggccctgggctctttacaaatcatttctaatgtgctgatctttatgctgtacctcaaagactcttatcactacgactgaatgatacttcataatgctggagaatcactattcccagcatcttgaacagtaaatgaatagtcaagcaaaacagaatcctagtgctatgtacaactgtccttgagaagctaaaaacacgagatgtttcagatctcaaatttcagcccacattctcccatcaaatggtctccattacaaaggacttctagtgcaggtggtaacatttttgacatttatttaacaaaaatgtattaaacacctaatatgtgcttgcactgatccttgtacttggaactagaccatgaccaagatatgtagaattgttcatgactgtatctgtgtcaatgtggcttttagttgattccatttctatctgtagattccagaaggaaataatcacatatgagaaatatttaatccataagacaaggtactagttatgatatcaacaacttgctaaaaagaaatggtagatatagaataagtgcagtattcccctggcattatgtgctattcaagtccttggtttctacttctctttattggaccccacttcccaccactaagagggacaagagagacttgaaagaagcatgtgctttgctctttgctgattcaatagcaagtcaacatctcaacttgtgggcagaaaatgttgcttccaatggcagaaatcaattaatttgagggaagcatccttcttcttgatttaagtgtagtcttttactacacacactttcatttcctgtcaatgagaagcaaaagtaaaggtgttcttggaatgcatttctatttaaaaaaaattaaatggtcaggcacggtggctcacgcctgtaatcccagcactttgggctgtaatcccagttcttgggaggttgaggcaaacagatcataaagtcaggagtttgagactatcctgaccaacatggtgaaatcccgtctctactgaaaatacaaaaattatccaggcttggtggcgcacacctgtagtcccagctactcaggaggctgaggcaggagaatcgcctgaacctgggaggcagaggttgaagtgatcgagattgtgccactgcactccagcctgggcgacagagtgagactccttct

SEQ ID NO: 2 - DNA, 3635 bp, Homo sapiens
tttttttttttttttttttttttttggttttattttaattttaatttttaatttttttttgtgggtacatacttggtgtatatatttatgggggtacatgacatactttgatacaggcatgtaatgagtaatacataataaaaaacagggtatctgtcccctcaagcatttatagcttgtgttataaacaatccaattaaaatagtattttagtttttataaaatgtataattaaattatttttgactataatcacctgttttgctatcaaatactgtcttattcattctttctaaaaattttttgtacccatttagcatccccactatcccccatttcccacactgcccttcccagctccagtatccatccttatactatctctatgacatcgattgtttctaattttagcacccacaaataagtgagaacatctgacatttgtctttctgtgcctgacttatttcacttaatataaagactttcagttccatttatgttacagtaaatgacagactctcattctttcttatagctgaatagtactccactgtgtatatgtaccacattttctctatccagtcatctgctgatggacatttaggtctcttacaaatcttggctattagcaacatttgtttttgactgacttctggaaataaaagccaccttaattggggtgaaatggtatctcattttgggtttgatttgcatttctatgatgatagtaatgtggagcaccttttcacttgtctgtttgccatttgtatgtcttcttttcataactgttcatttaagttttgtccactctttaactggattactagaatttttctatagaatattttgaactcaatatattgtagtgtattagtctgtttctgcactgctataaaaaaaactgagactgggttatttatctatttatctatttatgtattgagatgaagtcttgctctgtcacccaggctggagtgcactggcatgatcttggttcactgcaacctccaactcccaggttcaagcaattctctgcctcagcctcttgagtagctgagattacaggcacccaccaccatgcccagataagttttgtattttcagtagaaatggggtttcaccatcttggcgaggctggtcttgaactcttgacctcgtgatccacctgcctcagcctcctaaagtgctgggattacaggcatgcgccactgcgcctggcgagactgggtaatttataaaggaaatggtttaactgagtcacagttccacatggctggagaggcctcaggaaactcacaatcatggcagatggggaagcaggcacctcttccacgacagcaggcgagagagcatgtatgtgaagcaaagggggaagagccccttataaaaccatcagatctcatgagaactcactcattatcagaagaacagcctggggggaaccacccccatgatccaatcactttctgccaggtctctccctcagcacctggggattacaattcagtatgagatttgggtgggcacacaaagcctaaccatattatgtagctattaattgcttttcagatgggtaatttacaaatattttctcccattctgtgggttttctcttcactttattgtttccttcactttaaaaaagctttcttacttgctgtaattccatttgtccatgtttgctttggttgtctgtgcttatggggcatagtttaagagatttttgcccaaaccaatgccctaaagagtttccccaatgttttcttgtaaaagttgacagtctgaggcgttaggtttaagtctttaattcattttcatttttgtatgtggcaagaagtagggttctagtttcattcttctgcccatggcttgccagttttcccagccccgtttgttacagaaactgtcttattttttgttgtatgttcttgacacttttgttgaaaataggtttagtttagctgtatgagtttgtttctaagttctccatttcattccatttgtatttatgtctgtttttattctagtgtcatgctgcttcaattgctataccttgatagtggccagcaggccccttgcagagggcaaagcaacgtggaatccgaagtcacgctccggtcgccctgtgactcctgcgtgttcggggcatccggctctggctccgtggcagggcccggcccggcgatgtgcggtccgtgaaccgcgcgggcggaaagcgggcggccgcctgcgctgcggcccttgggtgtttcgggaagtcgcccgttcctcgggagtcggaactgctgagactctctccgcggcgagcggacccaggcgggcgatccggagggacgtgagcgccccgcgggcccagccctcggcccgccctggaggcgggagaccgctttcctccccgtccctcgccccgtcgcgcctcccctgcctttcttctgtctttcccgcctctcttcctccctctcttttctcctctccaatgtccccgccgccgtctgtcttttcctctctccgtctctccctttctcgctgtctctgtttttcttctcatctctatttcttcaaccttatatgatgctactgtatctctgtgttactgttatttgttgcaagtgtactttgcaacaaagtacgtttcgtgaagatatttacattcccatttagacacgttatttaggtatgtgcatttgtttaatagacgtaagggtgtttcagacttattctacagcacagtttaagcataatttttataagcactgacaacccgaaaattgtgtgactcacatgcctgtgatttttttccgttgcactggtcttgaacaaaagctctacatctgcaatttatatctgtgtggtatcatcgaatcgccccgtttactggagtgacagaacacgatttcccgactacgacaagagctatgggcagtggggaggtcagggttaggatgacacagaaataaagataagtcattctctttttcacatctatagtaaacactaattccatatgaaagtaagacaaaattatcttgaaatttaaaattccaaacaacatcaatgtacattattacatataatgaaaattataaagcaaccaaataattaaaacaaataatgaaagattgtatgacctcaatataaaatacaagtagaatatatgttaaatataacaaaatacactttattgtagtatattatgaaatctccatatcctgcaatacaatacaatcaattgaaatgtgtaagatacaataggatttaatttaggatgtttataatgaaaacatgaggcaggtgaataaatgagtacactcatttaccatttaatatatcgttacttaattttttgtaaaaatattaaaagtaaacaccttgcatggtaattttactataattatatcaaactttaaaatgtgtaatcatttttccacagcaagtgctattaatgtttttggatattagtacttcacgggttcaggctagaagagtgagagcctacaacctattctgaaataaaagaggagcaatttcttggtaaggcggttcatgcctgtaatcccagcactttaggaggtcaaggctggcgtatcacttgagttcgagacacctggccaacgtgacaaaactctgtctgtact

SEQ ID NO: 3 - DNA, 3875 bp, Homo sapiens
agctttcttgtgggcaatggaaggctctgtcgtagcgatcaattcttctgtttactactactcggcaaatagggacactattttacttagtgtacataggcaaatatcaagggtgtgtgtgtgtgtgtgtgtgttgtaaaatggaagtaactaaaaggaaaacattttagatatatgttattataaaataagataaattcccatgcatttgggatgatttaaacatgtttctttataaaatcaagaagattagctgatttatatgatttgcttcaatatactgggcttgcaactggagaaggcctgctttccaagaaaaaaaattgtctcaatcctataccatcataactgacagctccacaacagtggtagagcccattcattccaaggaggactcagatgctagtgatcttcatcctgtcttccacttgtgaggatgaaaactggagtctgctgagtctgctttctagatatgagtagaccgaatgaagacatcctggcactggtgaattttatttctttattttcatcttcttttcagcacccattccattctttcccatgctgtatcagctttgattagggtgatattagtttcacttctgtcacaaaaggtaggctccctgttgtttaaatcaataagggctatcctatctctctttccacaatatttcacgtagcttaagtcttgaccagtcataacatgacactcccctgaacacagggacctgttcacagtgtttcaattagtaggaaagtcagatatttatttgatgtcctctgtgctgctggatgggaatgtaccatgttgcccaactgctggcagccatattagcacttacagggaagccagatgtagcgtgaagccagatttttgtatggcacaacagagagtctgaaagaaattgagtccttgatgacattactgaaccactgtaacttcaagttacaggagccaatgattcccctttattgtttaagccacttggaatagaggtgtactttataatccaagcaatcaaactgatgtgctttcattgagtgatttgtgaataaactcttcactcaagatcacagcacagtcactgtcctttaaattaaaaaactaaataactgtggaatcccccctatggaaatattctcatacctgagaatgtagaagttattttactaaggtaaaagctaactggcacaatttagcttaggcagctggccaatgattgtacagaatattccttgattgaggtccagagatgtccagtggcaggcccaaactgctctgagattagcgaggcatagtacatcaagacaaccttgtggtatacaaccagtcaggtaagtttcctccaaacacaaaggctttgcaactccaccacattcacaggactcaagtttgtttcagagacctaaatctggttcccaaggactttttgtgtcacataaaagccagagatagtaaaatatctgtgctcaaggccctctgctggcttcctattatgctcaaagaaagcaatagattcttgcaagtgatggaaatgttacccaatctgatcctcacttatacctgtaaattcatttcctagcactctctccttcatttaggtctagtctcaatggccacctcactttcctaccaacatgccatatgtattcctgccacatacccttttgtactggctactcctctgtcttagaaggcccttcctgccaatatctgcatggctctcttaactttcttctaagaacattttcacagtgaatctttcattgcatgatttttcaaaagtatcaaatgcttcttttatgatgttctttgctcccccaccatacctacacaaccttccttatccatgcttctgatttattttcttcttagtctttagcacctaacatagaagttttaaaattaattatcttgtttactatctatttccccattaaagtgtgattttcatatgcacaaaggaataattggtattggagttaccctaccttactcacaattataaaactgaagaatatatttatgaacaatgagcttcaggcattggatacggggcagcacaggattgtgaaagaaagcaaacatagaaaggaagtgtgtagtattttcctcacttttttttttttttctgcagggccttttcctgaacagtccaggaggtaggagccctcaaatgaatagaggagttagggaatgctgaggtagctgagaatgcagggcacagtcctagagaaaagagagccatgtataacagataaagaagccagaaaaataaaaagaaagtatgaatcattatgtacaatggcacaactataagaattgatggctgaattttttaacagatacagtagaaatcagaagacaagaaaacctcatcattaaatggcaaaaaaaattaaaagtcagccaaaaattctgtatcccatgaagatgtccttcattaatgaggttcaagtaataatatttcaattaaagaaaccaacagataaagaatgtacattttgtatatgtattgtcttacataaaatcaaaactgagatagtttatatgtttagcctcaatatataacactcagtaagtctcaatatatttcaaaataaatgtttaaagttttgttttaaattgacatgataattgcatatatttatggggtacagtgtgatgctttgatacctattgtaataatcaaatcagggaagttagcatattcatcacctcaaacacatgtcctttctttgtggtgaggacgtgccaaatcctcgctttcagccatttggcaatatatgatacattattgttaactgccgtcatcctgctgtgcaatagaacaagaacttatttctcctatcttactataactgtatgcctgttgactaacccgtccctttaacagtcctttctccctcacctcccctgcctgtagcaattactattctccttctaaaaatcaatttttaaaaatttccagtaggagtgagatcatgcagtatttgtccttctgtgcttggcttaattcacttaacattgtctataagtttcatccatgttgtcacaaatgacaggttttcatttctttttatggctgaatagtattccattgtgtatatgtgccacattttaaaaatccattcatctattgatgaacacttaggtgttgattccatgtctaagctgttgtgaatagcgctgcagtaaacctgagagtggagatatttctttggcatattgattttattttctttgatatatacccagtagtagtattgttggatcatatggtagtcccatgttattttactttttaaaggaacttccctactgttatccataatggctgtactaatttacattcctgccagcaatgtataagatttcccctttcttcacatcctcatcagcatttcaatggattaaagacttaaatgtaagactcaaatattaaaactattagaagaaaatgtagggtgaatgcttcatgacattgatttgggcaaagattttttgaataagacctcaaaaacacaatcaaagtaaaaatagacaagtgagattacatcaaacgaaaaagcttctgcagagcaaagaaaacaatcaacagagcgaagagactacctacaaaatgaaagaaaatatgcacaaactgaatctgacaatgcgttagtattcagaatatgtaaggaactcaaaaaaatcaatagccaaacaacagatatttgatttaaaaatgagcaaaatatatgattagacatttctcaaaagaagacatacaaatggctaatatgtgcatgaaaaatactcaacatcccgaatcattgtggaaatgcaaatcaaaaccacagcgagttaccacctcacctcattgaatgctatt

SEQ ID NO: 4 - DNA, 5730 bp, Homo sapiens
ttctttctccttcctgccaccatgtaaagaaggacgtgtttgcttcccctcgccataattgtaagtttcctgagccccaccagccctgcacaactgtgagtcaattaaacttctttactttataaacaagtcagtcttgggtatgtccgtatggcaatgtcagaatggactaatacactctataatctctgccaagtctctttgtcaacatctattttatccaaactataatatttatattcttcttctttctaatagttcttcaactccccatcctattcaagccctggatattcctagatcattaaatcttggaattggatgggaccttggggtctgctttaaggctttcatgttgcatatgaggaaattgaaacctagtacttaaaattactcgccttaggccgtacaactggtagatggtaggactacaaataaaaccatatcttctaaaaggtatattcttttgacagtatacgtctttcccttaacataatgtctattttgcaatggtaaaagcatgtcaatctaaaattggataagaataatacttgaaggaacaacatgttttttaacttcttttcaaaaaatgaattattaacaaacttgaaattacaggcagaaagagtaacctcctaaaatactgactgctctcttataatgtaaataataataacaaatacaccattatgagtcaaagcagtaagtaatagctggtttgtaaactatttcaaatattagagacttaatgccataaatcattatttctccctcaagttgcaagtggatgatggttgcataactgtactggacacttctcttcagtggcaattgagggtataaagcgattgtttcatgctgccccttgctctcctccggactccttagaatcctgttctaaattttctgcattcatccagctactgtgcaaaagcagagataaggaggatcctggaatttgttttatgacaaggtttggattgatgcacatgatttctgaccacattacatttagccagactccggttacatgactcccacataattataaggaagaataaagaagataatctttcagtgtctctaggagtagaaaataaaattggtgaacatactggtattacagacctcaaattaaactctatttaggtacaccccaaagtggaataatattctgataattaaggttatgcttttgatgtatcaaatgcatccaaacaaaattaatgaaattatagaattttcataaatgaatttagaaagcctgtaaaatatagcttatctagatacatattagtttttggttcatacaatttactcagttatgcatagctaaataattctatgacagccaatttatgactgacattcatattgcagatgctgtatgtaatatctgtgatgtgaacccttggtatattttactacatatggctaagatcacaatttgaaatgagaaaaattgtaacctttttcttcccttcttgaggacatagtaaatttctgtatgttctcaagcattcataaaacttgaatatcacctctctgtttgccttcagaaccaattaaaagtggaaattattcctatcactacaacattcttctagttaaagtgaactcaatgaataacaaatttttggcattagaagtttgctgtggaagcttgctatttaaggtacaaaacattttgtaccttatttatatgccctaattggtcatttgttgtaacaaataattttcaattgtaagatatcaaagccatggaaacaagacaatactatagacctactagaatatttacctggcttataatgcatcctatttgtgtggaaaatgacctttactcatagcactgaacccccttaaatcacatgtcattaatatgcctttgaccgctgactacagttgacttggcaatgacagaccgtggacacgatttgagccaattagaatctatctcctaaaaacatgaggtgatgtatagactcaagatttaagcttttgattttgttttttaattgttgttgttgtgtggttagaagtttatagctttaacatataaattctgaaaatttggattatccatgttctgccctgtgagttaagttactcagaatatgaatccacaaaaagaaaaagacatgaagttaatttacagggataaacctaaaatgtataaagatccctggttactttgtccagtgaattattctcttttctgcccaacattggggtctataacattctcctgtggattaattaccttatatttattgtttaaatttggtcaagaaggtttatttaagatcaaaagatatttaactgtaacaattttacttcaaaacatctctcagaaacaggcaagtttattacgtgaagaagtatgtccatttaaggttacacacattctttaatttgttttgaacaataaacataatgaagagagttagctcatgttaactagaacaacataagcagaaatgatgttcgtcttcaaaactctaaaaagtcaaacacattttgaatttccaagcaatgacagtttgaatatcaccaacattgaagtgacttgcctaaaatattacatacatttatacacattataatatattatatatacacacatatatgtaatctgttttctaaacatttccgcatatttattgccctagtttcctactgagtattgagaatatatgtaagaagaaaagtattgcccagaaggcttaaagctgttggagaattggcctgtagaattcattaggggaaagcctattttagctcatcctgaatgaaccttagtactgatgaaaaaacttctggtctcaaggtgcagaactgtaattttctcttcattatgagctataattggtaagtgtgttaatatttgtgactctcaaagaaaggtactatcacttgttattacctttgcaaatatatgtaacagcgacactctctttattcactggcaggttatgacatttcagtgtcatggtttgtttgaaagaaatgggatatcatttttagttataaatgtgaacgttcccctagtaacaggattatagcaggaaatacttcccaaggacaaaattacagctgcctattcatttatcagagagacaattttctgtaaagtggacctctacactatgggtagcatagaatgcaattaattaattcttagacttaaaataaacacactttattcaagaaattaataatgcccggcaggaaagcctattatcatttctgaatgatatattggcttttaataaagaccaaaccattaacaaaaaaactgaatctaaagaaagaaaaacaattctttcgccaaattaatagtgcttttctctttccataatttttcttaactaaagaaagtcagatttccatttaaatccatttcatttaaacattttactgactgtcacaacttgctcctactagcaataaaggttgtataagttgaataacagtttagatgctttatggtgttctataataaagttctatccttaaccatgcccttctccctgctagtctttcctcattcaatggaaagaaactgacgttttacaaaacttgaggaaatcatgggaagctctagtttttaagctttttctccctttttttccttccttccttccttccttcctgccttcctgcctgacttcctgccttccttccttccttcctgccttccttcctgccttccttcctgccttctttcctttctttcttcctttttttaactgaataatctctccttgatgatctaagataatttaaacaaaattctacacccttggtgctggccctgaaggctgccttcaagacattaaatcatgatcccaactgttccattcattatattaaaagttaaaacattcaaggtaagcagcaataaatgatacaatgtttaattctagtgtttatcttcactgaatccagatatatccacaagttctggtttgctaatcctcaactgaaaaatctaagcaaagatgatactgtaagaataaaattaagcaccatcccttgaaagatttacctttgcaggaaaacagagattatatttttcttgtttaccaccttggcaacaccaagcctcagatgaaaaataaaataaaactctaaggataaatataaattttctgtgcatgcaagtatgtacaatcgaagacaaatgtttgcttgtttttagtatctacatgatgctgttttgcatatttccacaacgggctccttacttccttggctgatttaactagaaattagaaagtttatggaagtcaatattacggagccaacttgagccacaaagttttcatccttgtaaattctacaatgtgttctctatatgagatagatttatctttctggttgttatcttgttacttttaaggtgtaagcacatacatttgcaatatatcatgtagtaaaattggattacttgtatttcatattaatagctggacaaaagagtccagtaattacacacatctggaaactgagtgttttcaacaggaaagagaacactttctgtagaaaaagagcaccttccttgtagtccaaatgtttttatctttatcttggcttggccattatattgttctacaagaaatgcgccaactgtttggggcataatctgtctgctctgataaatgtagaaaatgatcagagaaattccctagtaccaattctgtttcagcaggatgatgatgatgatgatgatgatgattattattattattattattatttgagacggagttttgctctttcacccaggctggggtgcagtggtgtgatctcggctcaccgcaacctctgcctcccagtttcaagcaattctcctgcctcagcctcccaagtagctgggattacaggcgcccgacaccatgcctggctaatttttgtatttttagtagagacggggtttcaccatgttggccaggctggtctcaaactcctgacctcgtgatccacctgccttggcctcccaaagtgctgggattacaggcgtgagccactgtgcccggcctacgattattatttttaaaattcatcaaagttatgtattttcataggttaagagtaaaaaaaatcattaattttcatatataactctatattttgtactccctcaaaacaaaaccaatctacttttctacttgctggggaaaagatgcttacctatataaaaggaaatgagatattgcttcttaaaaagacttttaaacaactctcttgttttttaacatcatctcctctactatttcaacattcttgatgtttataattctcaggattttggaccattccataatttatataatactgattttgcccttcccaattgagctaccctatctgcctgtaatgagttaatactattctatttgcttatggctatgttccaaaatttgactcctgtctcttctttcttttctctttttttggggggtgcggggggttgggcagggaggttcatgccatttgtcttttaccttcactgtgaagaaatagaaactctactatataactcatcatgtttttaaattgaaagcaaggtatagattttagcataagagtgtttcatgatgtcaccatattcacacctatagaaaccagatttttataagttcatgaatcattaagctaaaaaatcaaatgattatatcaatatatgcagaaaaagcattgaccaattaacaccacccattcatg

SEQ ID NO: 5 - DNA, 1326 bp, Homo sapiens
ggctcagacatataataagaaaatatttgctacaatcagatatatgagtttaaaatgttttatgtggcttgaccttttaattccttaatggtgtttttaagtcagatgttttaattttgatggagtttaatgtactaattttgtcttttttggattgtgttatagatataatcactgatagctctctatataactcaagaatcttctgtaaaatgctgaacagaggtcatgagagtggacatctctgcctggttcctaattgtgtgagataatcacaggccaaagtgaggaatgtgtgaagatcttggcctctctgaagtctcatagacatatggaagctcaccaaggaccccatatctgtctcatttcttggatgtccctgatagatgcctgagggttctgccattctgtttgcctgaatccatgccacatcttcattcttgctgagtcacttttcttctgtagattcatcatcaatgttgctcttgttactgatagtgctgcttgagcatggtgtcttacgttgttctacttcatatcaggtcaggctcctctggcaaagactttcagtttttttctcctctggtagaactatcactgtgactcagctgtggtgggggaagggcgaagccccaagtaaggatgccacaggctcccacccttcttcctcaaaatccagttgtttctttacagtaaatgaccacttcttagttcaacgtttgctttggtcaatttccagagtcctgatggggtgattgttggcagtaatgtccagttttattaattatattgccacactggaagtcccacttcacaaaagtttttggttttgctcttttacattttaaaaggagcagttttcagcactgtatactgtaaattggcattcctgatgtggcatactatgttctttgatgtgagtatgcatggtcctatgtcagtaaagaggaattgaaccaacctcactttaggaaattgagaaggaatttctcaggaaagtacaggcctacctcatttgactacacttagtttcaacatgcttctcactgaaggtttgcagcaactctgtgttgaacaagtctaccaatgctatttttcaatagtatgtgctcactttctgtctctgtgtcacactttgatatcttcataatatttgaaactttttcattactattatgaaacagactattactatgtctgttatggtgatctgtgataattgatctttgatgatactactgtaatggtcttggggcaccatgaattgtgcccaaatacatggaaacttaatcataattagttttttgtgtttatgagtgctccacc

SEQ ID NO: 6 - DNA, 3530 bp, Homo sapiens
tcagagatgccaggctaagtccacatgatcatagaccttccatttgaggcagtaaattttaaaggaaagcatggagtatttagagtcagacctgagcgtggttcttactagccatgtgacttcagaggagctgcctcaatgagcttcaattttctcatttgaaaaatggaaatggaccatattcatcttgacatgaggaccatagcagatgacttgggctcaagccctcaacgaaagccacttcccttccctctactctgcagatctaattggccctttccttctcccacagcccctgcagctgtgaaaggtgtctgcctttaacagctagagagggatgatgtggggacagctactgcgctggactcaaaagcaaacttcctgaaccttggatttccacctcagttctgtcattccctgttgatgttcttgggagagaaggatcttgggtctgaggccagccagacactcttactcaccatgtgaccttaggtaagtcccttcacctctgtgagccctcatttcctcatttgtaaaaaatatttaagacctaagacctccctgcagggttgttttcctgattggcaatgttttcttttttcttttttgattttgttttttgttttttgttttttttttgagattgagtctcgctctgtcacccaggctggaatgcagtggtgccatctcagatcactgcaacctccgcttcctgggttcaagcgattctcctgtctcagcctcctgaggagctgggactataggcgcccgccatccctcctggcgaatttttgtattttttttagtagagacggcatttcaccatattggtcaggctgctcttgaactcctgacctcaagtgatccacccaccctggcctcccaaagtgcggagattacaggcatgccaccggcagtgttttcaaaagcactgaactcaatcctgagcgcatgcattcattcagaaacaaatgcctttgggtccccagtgagggccaagccctgtcctagggcctggggacacctcatcgaacaaggccactgccctcatggagttcacagatgggcacaggagacagagtagacaggaagcaaggaaacaaagatcattgcaggctgtgacgtgtcacagagtaaataagtgtgaggatgcagaaaaataggtgggcagtggcggtgggggggccttgttcttagatcaggtggtggtatgtatttcctgtggccactgtaacacatgaaggcaaactgggtggcttccaagcaacaggaatttagtctcttacagttctggaggccagaagtacaaaatcaagatatcaatgggactgtgttccctttgatggttctaggggagaatccttcccgcctctcttatgtcctgggagccgttggcaatctgtgatgctccctggcttgtggctatgtcactccaatccctacctccatccacacgtggccaccttctccccttctcataaggacatttgtcataggatttagggcccaccaagttagtccaagattatctcatctcgagagtctgaattacacctgcaaagatgctctttctgaataagtcacattcgcaggtactggggcttagtacatgagcatatctttttaggagtgacaccatccacacagtaccacgtcttggatggcatacagtaggaactcaatagatgatacctgtggttattacacggaattactagtaatattaaaatgttggctgggtgtggtggcccacacctgtaatcccggcactttgagaggctgagacaggtggatcacctgaggttagaagttcaggactagcctgggcaacatggtgaaaccccgtctctactaaaaacacaaaaattagctgggcttggtggcacaggcctctaatccctgctacttgggaggctgaggcaggagaatcgcttgaacctgggaggcggaggtcacagtgagctgagattgtgccactgcactctagcctgggtgacagggtgagactccatctcaaaaaaataaaataaaataaaatattggcaggccattgtttcatcaatggtaaacgtgtgtgccccagtgcagagatattttagacgcaaaaatgctttgctacaagtcaagggaaaagcaaccccagaaagaagcaaagatgttcacaccaaaaacaaacagaaaaagtgtttgtgactgcttcattatcatgctgttcaaagagctgctcagtggggaaagcagtcttccatgatgcttgtgaggtcaggaagccccgagcggtcaatgctcttacgcagagcaggggatgtctcttaccccaggaacatcaaaagctctggcaaaagaagaaggtcccaggatccacttactacaaggaagaaatttcaccacctttatttcctaaccttgtcagtgtgactttgagacttctggaagagctcagagctatgcagccctgttatgcctggtaaggcagtagcttttaaaattttatatatatatatatgtgtgtccttgagtctgtcctggaggatgggggctgcctcttcatggtctccaagaggtattgttaggatatggaaagagcaggagtctccgagcaaagacgtgggttcaaatcctgactccgcctcttacccaagcaaaccacatcatcgctcaaaagcctcgttttcgtcacctgtcaattggactctgaccttgcagagttgtgggcactgaatatgagaatacttgtctctttctcatcatcaacttagactgtaccaggtgggagtttttaattcccatttcacaggtgggaaaattgaggttcaaggaacttatatcaactaccccaagagccaatggccatgaagtgtcagagctggaatgagattacaaaagaagtggacaaaggggtcgtgggactgcagacatggacacgtactccagcttgagaagttaaagccttcctgagtggggagaggtctcagctgagacctggaggcgagacagtgaggcgttaactgggctgagaagtaggagagggattcccaaaagtggggacagaaaatgccaacatccagaagtaggagacacccaaagtagcaatacctcagctcttgcagctggagaggtgagccagggtcacaaatagccccacaagccacactaatgagaaatccaaccacagaggcagccctcttggagcttgctttacatcaacacatgataacattcttcttagaaaaaattaaaacaaggcccggcacgatgcatgcctgtaatcccagcacttagggaggccaaggcaggcagatcactcgaggccaggagtttgagatcagcgtggccaacatggcgaaaacccgtctctactaaaaatacaaaaattagctggacgtggtgatgtgcacctctaagtcccagctactcgggaggctgaggcaggagaatcacttgagcctgggaggcggaggctgcagtgaggcgagatcacaccactgcactccatcctggcgacagagagtgactccatctcaaaagag

SEQ ID NO: 7 - DNA, 1147 bp, Homo sapiens
ctctcattcttcctttcttgttcactgaatagaatcttctgtaaatgctaacagagtcatgagagtgacatctctgcctggttcctaattgtgtgagataatcacaggccaaagtgaggaatgtgtgaagatcttggcctctctgaagtctcatagacatatggaagctcaccaaggaccccatatctgtctcatttcttggatgtccctgatagatgcctgagggttctgccattctgtttgcctgaatccatgccacatcttcattcttgctgagtcacttttcttctgtagattcatcatcaatgttgctcttgttactgatagtgctgcttgagcatggtgtcttacgttgttctacttcatatcaggtcaggctcctctggcaaagactttcagtttttttctcctctggtagaactatcactgtgactcagctgtggtgggggaagggcgaagccccaagtaaggatgccacaggctcccacccttcttcctcaaaatccagttgtttctttacagtaaatgaccacttcttagttcaacgtttgctttggtcaatttccagagtcctgatggggtgattgttggcagtaatgtccagttttattaattatattgccacactggaagtcccacttcacaaaagtttttggttttgctcttttacattttaaaaggagcagttttcagcactgtatactgtaaattggcattcctgatgtggcatactatgttctttgatgtgagtatgcatggtcctatgtcagtaaagaggaattgaaccaacctcactttaggaaattgagaaggaatttctcaggaaagtacaggcctacctcatttgactacacttagtttcaacatgcttctcactgaaggtttgcagcaactctgtgttgaacaagtctaccaatgctatttttcaatagtatgtgctcactttctgtctctgtgtcacactttgatatcttcataatatttgaaactttttcattactattatgaaacagactattactatgtctgttatggtgatctgtgataattgatctttgatgatactactgtaatggtcttggggcaccatgaattgtgcccaaatacaatggaaaaattaatcaataaatgtgtgtattatgatgcc

SEQ ID NO: 8 - DNA, 1124 bp, Homo sapiens
agatgggtggtagccaggcatctggaaggagagccttaggatatggacctggcttcagactgccagagcctggagcccaggatgaccctgtctactaggatgaaggaaagaagactgaaaaaccaaacaatgcatcagttgaaagagtctgtgcttcaatgcagaatacaaaagagatctgaaaccatacaccttcaaggagtttgcaggccagtagagaataaaaactggaacctattggcagctatgcatcagtaaagtgaagaagcacctcaggaaaagggagcataagggaaaataaggagacataaagaaaaatggaaaacatgaaagaaagagattgagagttgtaacaatgaaaaaggaagattgcacagtgaggcctgaatagcatgtgtaggagacagctacctagaatggagcatgacagaaatcttcacgggacattcctccaagatcaggaaatttctcaaatgcttcaagtgcccggaaataagaagttgaaaacgaaagtttgctgggagttccattggtaaaatgtacatattgaaaacagttaaaaaatgagacagagaaaaagagagagaatcaaacacacgtaacatgacaatatttaatgctttttaaaaggtagaaaattgagtcacagtaattacatgcttatctgtatgtaacatttaccaaattataataataagtgcaaaatatctaatcatatttataatattactgtattggaaggataaaaggacagataaattaactttgtatctggtggacagcaaaaaacagacatctattatcttccaaagtagcaagtcaatgcatatataatgtcaaaattcaaaaagtaaaaaagtaacaatgcaagctgttattttgagaaaatgccaaaatattcagccgaaaagctataaaggtactatgtcaatgaaagggaaatgggagattgtctatttttttaaataaattttggagaataactttatttttaaactcttgagataattcactgcgatagaactcaaacaaaaacaaaagataataaattgttgtctgcatgctgtaattacagctttcttttataatgtttgagaaagaaaaataaaacttttgataggttt

SEQ ID NO: 9 - DNA, 5347 bp, Homo sapiens
acagaaaggagaccccgtgaggacagagtaggaggcacctatatctgcaagccaaaaaaggcctcacgacaaatctaacctgctgacaccttcatcttgaaccctcaaactccagaactgtgagaaaatcaacttatgttacttaagccacccattctgtggcattttgttgtggcagccctgtgaactaatatagaagatattataaaatatacttggaaagataatctggactattctatagaactccttaaagctgagatagaaattacatatttgatctggtactaagtaagaaactatcacaagttatgagcactggaaatggacactctttccagaactcaaccatcagctgctgtcttgagagtaaagataggatggaaaaagcaagtaatgttgaaaagactttttgaaaatcatttagaaaaagaggaaggaaaatggaagtaaagtggcatagcacagtagaatagttctttctagagcagcagccaggaggtcatgttcttatgtaagctctccggtcaggtcctcagtgacttttaaaaaggtccttgacattagggggctgctgtttctttgttggtagcacagaaatgttaatagtggtcatcctccttctacaggatgcttgctggttaaatatgaaactattgagaaagtactttaaaaattacagaatgttagacagatattctacattttcttaatgttagaagagaccataaggccaaagagtctaatctccttacttaaaagttgttagacaaaggtatggcattatttgtattgaaggcagataaaaaatgacccctctcccatgatctccaacattaataggtttttaaaaaattgttccgcttatatatccgaacaacttgacagaattgaattggcatacacttgggagaaaagtaagaggaagacatttaattcaagcaccgaataagacctggaaattctttaaatcaaaatttagctatatgttcttaggcaagtaattgcatttgtgtatgtgtgtgtttgggggggtatgaatctatattatatattgttagaaaatattagagaatctatttttaaagagcccaaaagattattagataggtgacaattattggtattattacaaattgtagtaatagtgtcaacattcttgtcaggttaaatcctagtggtgtttaagagctaaactgttacatttttacttgctctaattgttagaaaaccttttttatattcagttgaattttgcattccctgatttctaaccagaggcccttgttttcttcttgtcattttcattttatttttcaaaaaataagtatctgttcttttgcaaataatagttctttagttgtttgacatcaaccctcatgttccttttaatcctataatcttcaggtaaagggtatcaagttcattgtatcaaaccacacataaaatgaatggctatctcttccctgcactagttgcagtgttgtgaatatactgtaactccacagtttctttaataagtagtatctggaacttagcattaaaattcagctgtggatggactactgctgaacacttctgagaaatcttccagtcactagatcttctaattagcattccttgtactgtgtcatttacaatagtaggagctcaatagttttaggttttagtatggcttaaattgacattttaggcttaaattaacattttaagtagctattttctgttgcccactacccttgtatattccagtgaattcaatctaaagtcaaagatgtttgctaaaatcatacagagattatgccccatgtataagctatagataatgttgggtcttatcagtcaccttttggtggttaatataaaaataaagccacttgataggcatgactaaaatttcaataataacatattattatatattaagtcacttagaggaatgcaaatattttcatgtgacaggccatgacactatgtgacttgcagcacagctgtgagaaatcaagtgctaatctacattacatgtgagtatttaatacatttttaatagtataaaaagtaaaatgatgagatgatgagatgttcacagtgtggatgaaaaagaatgagggcagacccaaagcccaaggaacacatctttcccaccttttcccaccctttcctcagcttctcagagatatcctagcttcacttcttcgtatgtgaggttgtcaatcaaactaggtgtttttggtgttgagatgccactcaaaatggacactgtgcaagtgaaactgtcattcaacattgctgcctggcaaatggagctgtcagtcatcttgaacagtttagtctgttgaattgtcaataagattgtctggtatgtactgatagctgcttcatcagattcaaaaagtcttcattaactccctagtctgcagtttcccaacctctttttcttttcaatggaaagatacgttttattttccaaaagctgatgataatcaacaactaaaacagaaggttatagtgaaaagcaaatatctaggctacaaattgctaataaaaatggacaaggaacgaggttggctgctcactcaacttgtcatcattaaaggccaaaaagaatggagtatatatagtgtatgataagcattatggatattaatttattcaagtattaactacataaacctcaatgacatatttattgggaaccagttgatatttatttgaaataagacattagtgagttcagagcaaattaagacttcaggagctaacatttttcaacaggctctgagtaaaatgctctatcctgcagtgccccaattttgcctcttcctctatcattcttgacacagtttcacttatatgatgaaatcatgtttccttttacctgctatgtggctacaggtgatgcttccctcttaattcttaacttactggcttcacctggccaaagctgctttagttttaactcttttcctgtttaggaaaagaaagtgcatctcgctgccagtgctcatttaattttatataaaaaggctttttgaggctgaagcaaatctgactgattttcaatatgaaaataaaatataaaaactgttcttggagttgttctaaacagaactaacatcagaatcatctgaatcatcaggattgtctatttcggaaaaaacagattcatcaaaggactatttggctaactatttgagaacgatgttaacatgacacgtaggaatactatgttttctaggatttgacattttcagtgattgagaattactacattttgtaaatggaaataccactactgaaaacagaatgctataattagaatgctgtcttttgtttttaaagtctatatactaaagtgatgcaaaaaataataataaaaataataataaatgatatttggtagcaaagttatctcagggtaaacgctgcagctgcaagcgccactagcaaataatcttggggcaaacgggaaaaaggttaaaagattatggcaaatgtattagattaggagatatcatttgaatctatgtctatgaaatgtccatttaaaaatagtttaagctgacattaagttaatgtatgactttccagctacacctactaatggaaaaacaagatattaacctgtagttttagcagtaactagactgcatggaaattcccaaggaaataaattccagatccatcttggcagaaaatgcatctgattttttagtactgtgttagaaacagtcactctgctcaacacagagtacctttggtaacagtattaaataaaggaatcttagccagattagggtgcgctataggaagcttcgttttaatgataagataactagagacaatatttctggcacaaataggcctagtatttggaatgatagagcaacttccctagattctgcgagctcagagtgactcagcctggttctacacacccttctgatggcaagggcggggcacttggagtagctgctgccatcgggctggctgcagcaggaaggcacctgcggtggtggcaggagccgctgagggagcaacagtggcggcaatgggatcctgtgccctgcatttccaaggcagccaactgcaccacccccaacctctcatggcagggcaggaccaactcccaggcctggagcctccactggagcttcaacctcgctccctgtgcatcctgggagcccacgagcacccagtggaaggtgcagccaggactggccccaagagcatcaggttcatttgtgcaaggttggctagggccctatgccacctgcacctcacccactgccgctgcagggaaaacgcggagaggaggcgacagtcctcagagcctgcccctgggagaccccccgaacccactgccctgggagccactgcagtggggccgagccacatgtcccaccggcaggggagcagcgtggtccggcacggagggggcgggcaaagaggggccccaaggaggagctgggccaggggcagtgccacgctccacagagcaggcaggagcagggagcaggcaggagccctgcattcccaggtgcaactacagctacccaagtcatggctgtggacccgggcctccctgtgctcttgagggcctggagcaggcatgagacctgcgtcctggctgtagacccaggcatctttgcactcttggggccagaagggacccccattcccctgcaggcctggaggtgtctgcttccgctgcctggcctctccccattcctggcacccactctgatcttggagcaaatctggggccaaggccagaagctgtggcagccaggccaggtgtgcacatgctcgggcagagctaacatgccagcctcctgctgcttcggccccctccaggctttgggcacagatgagcatgggagggaagctgatgggggagctgagggcagctcagtgctggcctgcaggtgccccttgtcgtgaacagcctgggtgccacgaatggaggcaggaagcagacaggctcctgggtgaaagagggcaggtcccaggtgaagctccaccttcaagccggggagggcctgaagcctgggggctgggctgctggtcccacataccggagtgggaacttgtggtgctttctctgggcccgccgtggccgcccatggaccaatcagcatgcacttcctctcctctagacccatgaaaagccctggactcagccagaccagaagagatgatgtgaagacccgcctgcagagaggagctaccctctctgctaagagctggacactcatcaggacaccctgattacaaagaggagctacccactgtggctctcctctgagctgttctatccctcaataaagttcctctttgtttgctc

SEQ ID NO: 10 - DNA, 2708 bp, Homo sapiens
ggtaaccgctggggtccccttctacactgtggaagcttgttctttgcaataaatcttgctactcttactctttgggtccacattgcttttatgagctataacactcaccgcgaaggtctgcagctacactcctgaagctagcgagaccatgagcccactgggaggaaaaaacaactccagacgcgctgccttaagagctgtaacactcaccgcgaaggtctgcagcttcactcctgagccagcgagaccacgaacccaacagaaggaaaaatctccgaacacatccaaacatcagaaggaacaaactccagtgcgccaccttaagagctgtaacactcaccacgagggtccgcggcttcattcctgaagtcagtgagaccaagaacccgccaattccagacacgttttggcaacccagatgggactttcgcctatcgccaagtggtgagacaatcgccgagcagtgagaccatcacctattgctgagcaaattgaggccatcaagctacagatggtcttacaaatggaaccccaaatgagttcaactaacaacttctaccgaggacccctggaccgacccactggcacttcccctggcctagagagttcccctctgaaggacaccacaactacagggccccttcttcgcctctatccagcaggaagtagctagagtggtcatcggccaaattcccaacagcagttggggtgtcctgtttagaggggggattgagagatgacagcgtgctggcagtcctcacagccctcgctcgctctcggcgtctcctctgcctgggctcccactttggcggcacttgaggagcacttcagcccactgctgcactgtgggagcccctttctgggctggccgaggctggagccggctccctcagcttgcagggaggtgtggagggagaggtgcgagtgggaacccgggctgtgcgcggcgcttgtgggccagctggagttccgggtgggcgtgggcttggtgggccccgcactcggagcagccggccggccctgccagccccgggcaatgaggggcttagcacccgggccagcggctgcggagggtgtactgggtcccccagcagtgccagcccgctggcgctgcgctcgatttctcaccaggccttagctgccttcccatggggcagggctcgggaccggcagcccatcatgcctgagcctcccaccccctccgtgggctcccaagcctccccggtgtgtccggagcctccccgatgagcaccgccccctgctccatggcgcccagttccatcgaccacccaagggctggggagtgtgggcgcacagcgtgggactggcaggcagctccacctgcagccctgatgtgggatccactgggtgaagccagctgggctcctgagtctggtggggacgtggagaacctttatgtctagcccagggattgtaaatacaccaatcggcactctgtatctagctcaaggtttgtaaacacaccaatcagcaccctgtgtctagctcagggtttgtgaatgcaccaatccacaatctgtatctaactactctggtggggacttggagaacctttgtgtggacactctgtatctagcccatctagtgaggaggtggagaacctttgagtctagctctgggattgtaaacgcattgggattgtaaatgcaccaatcagtgccctgtcaaaacagaccactcggctctaccaatcagcaggatgtgggtggggccagataagagaataaaagcaggctgcctgagccagcagtggcaacctgcttgggtgcccttccacactgtggaagctttgttcttttgctctttgcaataaatcttgctaccgctcactctttgggtccacactgcttttatgagctgtaacactcactgtgaaggtctgcagctttactcctgaagccagcgagaccacgagcccactgggaggaacgaacaattccagacgcactgccttaagagctgtaacactcaccgcaaaggtctgcagcttcactcctgagccagggagtccacgaacccaccagaaggaagaaactccaaacacatccgaacatcagaaggaacaaactccagacgtgccaccttaagggctgtaacactcaccgtgagggtccgcggcttcattcttgtagtcagtgagaccaagaacccaccaattccggacacagcaccactgcactccagcctgggtgacagagcgagaccctgtctcaaaaaacaaaaaaccacagattgctgggccccacccccagaacttctgtgttgggagcaggccccccaaaatctggccataaactggccccaaaactggccataaacaaaatctctgcagcactgtaacgtgttcataatggccctaacgcccaagctggaagattgtgagtttatgggaatgagggcaaggaacacctggcctgcccagggcggaaaatgcttgaaggcgttcttaagctacaaacaatagcatgagcgatctgtgccttaaggacatgctcctgctgcagttaactatcccaacctattcctttaattcggcccatcccttcgtttctcactttttagttaattgaatatccatagaaacaatgctaatgactggcttgctgtaaataaatacgtgggtaaatctctgttcgggctctcagctctgaaaactgtgagactcctggtttcccacttcacacctc

SEQ ID NO: 11 - DNA, 1503 bp, Homo sapiens
ttttcttttttttttttttttttgcgatgggcgtggaggtcttgctctgttgctcaggatggaagtgcatatggcgtgatctcagctcactgcaacctccccctcctgggttcaagcaattctcctgcctcagcctcctgagtagctgggatcacaggcgtacaccaccacacccagctaagtttttgtacttttagtagagacggggtttcaccatgttggccaggctggtcacggactcctgacctcagatgatctgcccgcctgagcctccgaaagtgctgggattacaggcgtgagccactgcgcccggcatggagctgctattgatgggtgagctccacagcttttgcagaagcagaggatatgacttgagagcagtgctgtcacctctcagcatgtccccaagcccaactggggcctcctggagatgcctcagtcggcactggccccaagggaatcgtggggaacagttgcacaatttgcaagtttctgagtgcagcttttcccatccttgggatcagcagataagttgtaacacagggaggtactgcttattggatatacttttcataagtaggacagaattcttttgggactctagagttgggaactaccacttactagcggcgtggctgaggcagtcttcctcctctgtggctcaggcccttcatctgtgaaatggggtcacagcatctgcctctcagggtcactgtgaggtgtcgatgtgagcaaggcctgaggcttggcaagaagtcaatgtctgcaactcagcagggagcaatggcaggggcagtcaggggtcggctcggataggggtgggtgggctcctgaggttggaagggtaggaattacagagctcttgttactattgttgttactgtttttaaagatacgatatttcagataattcaggagcacgtaaggatgaaacttaggataacctaaaatcacacaacctagagagaagcgcatttttgtcttcccccattttctaggcaaaaatgaaagtactttgtcctcttgaaaaacaattctctaatgaatatcctatgttacatagaggcctgtgtaatgcatttgtgtggccacatggtgtcaatttcatgaatatacaataatattattaattccctgctgaggacattaactggtttccaaggctgcttgttgtttttgctactacaaataatgcattgatgataaatacttttacatacatggttgtatgtttatctgaactattttcaccaatatattcacctagtgtgtatggaagtgtccatttttgtcatacccctggtaaccctgtgatattatttttaaacattttgctaatggatctctgttcttgtttgaatgtatttaatttccagcagaatgagccccattccttattttgattggccatttatcatgtacatatggtgaaatgcctattcgtgacttagccaatgttgtttctttttcttactgattactacagtacattttatatgaaag

SEQ ID NO: 12 - DNA, 3481 bp, Homo sapiens
tttttttttttttttttttggtaagagaagggggttctcactggtgtttgccaaggcaagttatcatgttctgattttggttctgctttccctgctagcgttacgaccatgggcaagaaacctggcaagttacagtctggccctctaaagtggagtatgttggatttttgcgtataaccctttatcttctaaactgtgtgcttaagcttccttttcttgcagtttaacactctggctagtcctaacctgctaaactcaacgcaaatgctgaggtgctccagccaactggtggttgaagaccagaatgagtagtctaccaaaggcaactgagtgctacagggttaaggcccaagccttctaggtactctggcccagaaaccacccacacatagtttaagctgccagccactggggaccatgctagtgcctggggatacagaactagtcagagctgcttgttatggaaaccacaatgtggttgtcagaggggaatccagcctaagatacctggagggcaccaggagaactgaacttgactctgcttaaggtggcaaatgcaggaaagcttaggaaacaagtataaatggtttattttcacaaatcagtgaaccaaactgatgtgtgatgataccagttgacctttaacgattttaggaagttttgtaattaccttttgtcaagattgatactttttttttttttccctgagacggagtctagttctgtcacccaggctggagtgcagtggtgcagtctcagctcactgcagcctctgcctcccgggttcaagctattctcttgcctcagcctcccgaggagctgggattacaggcgtccgccaccatgcccagctaatttttgtatttttagtagagacagggtttcgctgtgttggccaggctggtctcgaactcctgacctcgtggtccacctggctcagcctaagattgatacaattttttatgcaataagtatgtaagtagttaacctggaatctaaaaggagcttgaaaggcaaaggcattcaacaataggcacaaatgaaattctagaccctctcagttaccctgcttgaacgtatggctttgataacatgactcaactctgaaatgctctgatgattgcctctggaacacagtgctttattttttgctttaaagatcagttctgttcaaacatgacatggcgtatcatagtggctaagagcacagagtttggaatttaaggctggggggatgaagaggttgattaatgggtgtagaaatatagttagaggaaataagacccagtgtttgatagatcaatagggtgactagttaatgatttgtattttaaaatagaaaataattctttttttttttttttttgagacggaatcttatcgctctgtcgcccaggctggagtgcagtggtgcgatctcggctcactgcaagctccgcctcccaggttcatgccataaaatagagaataattctaatgttaccagcataaagaaagataaatgtttaaggtagcagatatcccagttaccctgatttgatcattacacattgtacgaatgtatcagaatatcacatgtactccaaaatatgtacatctattttgtttcaataaaaaaaacaggccaggcatagtggctcatgcctgtgatctcagcactttgggaggcctaggtgggcagatcacttgagtgcaggaattcaagaccagcctgggaaacatggagaaaccccaccgggagtggtgttgcgcacctgtagtcccagctactcgggaggctgaggtgagaggattgcttgagctggagaggtgaaggttgcagtgagctagatcatgccactgcaatcctgcctgggcaacagagggagaccctgtctcaaaaaaataaaatagggcatggtggctcacacctatagtcccagcactttgggaggcagaggcaggaggatggattgagtccaggagtttgagactagccagtgagaccttgactctacaaaaattagccaggtgtggtggcatgcacttgtagtcctaattacttgagtttgaggctgaggcaggaggatcccttgaactcaggagtttgaggctgcagtgagccatgatcgcatcactgggcaaccaagcaagaccctgtgtctaattaaagtaaaaaatttaggctgggcatggtggctcatgcctataatcccagcactttgggaggccaaggagggtggatcacgaggtcaggagatggagcccatcctggctaacatggtgaaaccctgtctctactaaaaacacaaaaaattggccgggcttggtggcgggtgccagtagtcccagctactcaggaggctgaggcaggagaatggcgtgaacctgggaggcggcgcttgcagtgagctgagatcgctccactgcactccagtctggatgacagagcgagactccgtctcaaaaagataagaaattaaaaaattttaaagtgtaagcatctcagatgccttgcaggaatgtgggataaagtgctcagaatgttccctggcagatagtataggcttgttttccgtgaagagcctgtaactgccacttggttccccttccacccctgacattaggaaatagttgtgcaatggttgttactctcagggtggtcacttaggcaaactccagaggagggtgtacttccactgattatccttctagcccctttcccccaaatccccaaggaaggctgggaatcatcaaaatggagttggcctttacttgtcaacaattgagtaaatcctaaatacggacgaacacccaagtagctcctgaattacaattaaaggaaaaacatttcttaaaatggaaggtgtatgtactttgtagcggatattctgtaatctcagtcacagggccatgtcttactctatattgctagtgtctggcccttgagaccagcttgttgctcagattggacacagacagcaacactgccactgactacctgggtgagaaggtgggcaagttagccagcctctctgggcctcagatcttgtgtaaaataggtataacacctaccttacagggttattttcagaaattaaagatagtatatgtaaatcactcagcatatatagtaggagctgtttaaagtattgtaaatattatgtaataattgagtatattcttggtattctgtggtaagcttaaatttaagaggctttattctgtgatttgagcatcattctttgctggtgaagaaaagaagacaaggaattcatttaatatttgagtgcttacctacctgaagcatagcattgaaccagatggatatatagtccctgctgctaggtgagcaaaaataagtattaatacttgtgcctcttctgcctgtttttcaggtagaaaaaaacccagtgcccctctttgacattatttaaataagatttctcctcaatataacagtatagtgacattaactatgtttttcaaatcatttcttacc

SEQ ID NO: 13 - DNA, 3261 bp, Homo sapiens
ttttttttttttttttttttttttggctccctgaacttccatttcttcctctataaagtggaataaaaagattagaacttaaatgactcaaatatctagcacagggataaaaattcagtaatttaattattatttaattattactaaactcccttcaccaggataaagtaggtatgggttggagatctatcattactccatttttatagatgaaaaggttaagctcaaaggagttgcatgaattgtgttaggcaagggagtaattaatatagctgtgctcggggctaactagctgacagattggctggctcttgatttctctcttccacaatgcttttccataattagggctctgctggattcatcagctttaaagaaccattgaattatttaaaacagggattggcaaactatgacacactgcttgtttttatatggccctcaagtgtggtttctaaatttttaagtggttgaacacaaagaaaaatagtattttgtttaaacttgaaaattattagaaatgtaagttccagtctccataaataaagtcttactggaacactgcacacccatttgttaatgtactgttctgtaatggttttcatgctccaacagcatatttgagtagttgtgacaagagaccatatggcctgcaaagcctaaaatatttactatctggccctttactaaaaaagtatgccaaccctgatttaaaatgtaattttctcttgtaggatagacataccaaatatacatcttctaaatgagtaatgaatataccttaaaattaaaaaatcaagtgtatctgataagtgtgcagagtgaaacattttgatcacagcaattggaatatttaaatgagacaataaatatttatgagcattttagaagtattaagtcatttgagcttcacaacaactctaagaagcaagtactttttacatctgagagaagtgaaattcaacaaggttgggaaatatatcagaggccacaaagctagtaaatagctgggctacaattttaattgaagcctatacttctacctaccagaccaatatcacataatggatagcccaacagtaagaagctttgtataggtaggcttacctaatctctgcctttccaaaatctattccctgatgttaccttatagctagtttcattacttctctaagatatttttttccttctgtaaaatgagaaaaatacctaacttgagaggtttttttttcattgacaatattcaatataattgccaggttattgtaaagacaatatatttataatgccctacctgtatcaatatatcacatgtacccccaaaatatgtgcaactattatgtatcagtcaaaaatggccatatattaggtcacacagaagcctcaataaactagtatgtgtgtgtatatatatatatatatatatatatacacacacatacatatatatgtatattacaatgcctggatactatattatatatgtatcacaatgcaaaaaaatatatattttacaatgcctggcatactataaatgatagctaccactacttcattactattgcataggagatattttcttaagatgcacatgcatagcaaatctgctaagccaactctgggggcagagggaggtggcagctataagaattgcaaagacaattaaatatgttccttagaccctgaaagaaagcctagcaatcattcccaggctgtcagtgtttgttagacagcttctcctcctggagatggtttctgcacccacagtaaaggaaaggagtgacaaatactgctgaggttgggatgaggagctggtaatccatcctaggtcagttcttcatagttgatgaatggtgtttgcctataagaaagtgtgtgctctacgggaagaatcaacattagcatgtggagaagaaacagctattatgtagaaatagtagaggcagcagttgtgaggaaaggtaggcacagtagttgtaatttttactctagaattctcttctttgaaaaagtaaactagagagactgaggcactgaaacgtgctatgacattactttgaacccctaccagggaaaatacctgctacaagatttccttaatctctaatctggtagcagatatttcccctggtcacgaacctaggagtttatcttccattgctgaacaaacaataattaccttcctagtgtgggccaagcactgttgccaagtactgtgatcagatcttctcaactgattctcacaactaccctgtgaagcagatgttgatatctccattttatagatgtgaaaacagacttggaaggggcaagtgatgctgaacctggcccaacactgctggtaagaatcagaggtaggattgaatcaagtcttttgacacctattccactgccctttcaactaaccttagctaccactcatagctagtgttctgtgtggatacaatgccctacatgtatcaaaatatcacatgtacccccatgtgttaatttgttaattcattcaacaaatacttatgagtatgaagaagtgtctaagagggagcacacactgcagtaaaacccagacacgggaggaagcatggaggacagggggaataaggaatgactgcaaatgggtatggagttttttaggatgttgaaactgttctaaaagtagattgtggtgatggttatacaactcttggagtgtactacaaatgactggactgtacactttaaatggatgatatttataatatgtaaattatatctcaataaagctgctaaaaaagaagaaagaaaataaaaataaatataccaaaaaaggatatactctataagattagaatagaaataggcatatgtcatgagtctttacatcaaaagagaatattgtacaggattatgatattatagtttgattttggtacatgtcataataaaataaatgattataaacataagaacaaaacaaataaacaaaaaagcccaggtacagccagatgcaatggctcatgcctagaatcccaacacttggggaggtaggtggaggcaggaggatcacttgagcccaggagtttgaggccagcctgggcaacatagcaagacgctgtctctacaaaataaaaaagtcagccaggtgtggtgatgcatgcctgtagtcccagctactcaggaggctgggttgggaggatcgcttcagccaaggaagtcgaagctgcagtgagccacgatcacaccacctgcactccggcctgggtaacaaagtgagaccctgcc

SEQ ID NO: 14 - DNA, 3245 bp, Homo sapiens
ttttttttttttttttttgaggcagggtctcactttgttaccaggccggagtgcagtggtgtgatcgtggctcactgcagcttcgacttccttggctgaagcgatcctcccaacccagcctcctgagtagctgggactacaggcatgcatcaccacacctggctgacttttttattttgtagagacagcgtcttgctatgttgcccaggctggcctcaaactcctgggctcaagtgatcctcctgcctccacctacctccccaagtgttgggattctaggcatgagccattgcatctggctgtacctgggcttttttgtttatttgttttgttcttatgtttataatcatttattttattatgacatgtaccaaaatcaaactataatatcataatcctgtacaatattctcttttgatgtaaagactcatgacatatgcctatttctattctaatcttatagagtatatccttttttggtatatttatttttattttctttcttcttttttagcagctttattgagatataatttacatattataaatatcatccatttaaagtgtacagtccagtcatttgtagtacactccaagagttgtataaccatcaccacaatctacttttagaacagtttcaacatcctaaaaaactccatacccatttgcagtcattccttattccccctgtcctccatgcttcctcccgtgtctgggttttactgcagtgtgtgctccctcttagacacttcttcatactcataagtatttgttgaatgaattaacaaattaacacatgggggtacatgtgatattttgatacatgtagggcattgtatccacacagaacactagctatgagtggtagctaaggttagttgaaagggcagtggaataggtgtcaaaagacttgattcaatcctacctctgattcttaccagcagtgttgggccaggttcagcatcacttgccccttccaagtctgttttcacatctataaaatggagatatcaacatctgcttcacagggtagttgtgagaatcagttgagaagatctgatcacagtacttggcaacagtgcttggcccacactaggaaggtaattattgtttgttcagcaatggaagataaactcctaggttcgtgaccaggggaaatatctgctaccagattagagattaaggaaatcttgtagcaggtattttccctggtaggggttcaaagtaatgtcatagcacgtttcagtgcctcagtctctctagtttactttttcaaagaagagaattctagagtaaaaattacaactactgtgcctacctttcctcacaactgctgcctctactatttctacataatagctgtttcttctccacatgctaatgttgattcttcccgtagagcacacactttcttataggcaaacaccattcatcaactatgaagaactgacctaggatggattaccagctcctcatcccaacctcagcagtatttgtcactcctttcctttactgtgggtgcagaaaccatctccaggaggagaagctgtctaacaaacactgacagcctgggaatgattgctaggctttctttcagggtctaaggaacatatttaattgtctttgcaattcttatagctgccacctccctctgcccccagagttggcttagcagatttgctatgcatgtgcatcttaagaaaatatctcctatgcaatagtaatgaagtagtggtagctatcatttatagtatgccaggcattgtaaaatatatatttttttgcattgtgatacatatataatatagtatccaggcattgtaatatacatatatatgtatgtgtgtgtatatatatatatatatatatatatacacacacatactagtttattgaggcttctgtgtgacctaatatatggccatttttgactgatacataatagttgcacatattttgggggtacatgtgatatattgatacaggtagggcattataaatatattgtctttacaataacctggcaattatattgaatattgtcaatgaaaaaaaacctctcaagttaggtatttttctcattttacagaaggaaaaaaatatcttagagaagtaatgaaactagctataaggtaacatcagggaatagattttggaaaggcagagattaggtaagcctacctatacaaagcttcttactgttgggctatccattatgtgatattggtctggtaggtagaagtataggcttcaattaaattgtagcccagctatttactagctttgtggcctctgatatatttcccaaccttgttgaatttcacttctctcagatgtaaaaagtacttgcttcttagagttgttgtgaagctcaaatgacttaatacttctaaatgctcataaatatttattgtctcatttaaatattccaattgctgtgatcaaaatgtttcactctgcacacttatcagatacacttgattttttaattttaaggtatattcattactcatttagaagatgtatatttggtatgtctatcctacaagagaaaattacattttaaatcagggttggcatacttttttagtaaagggccagatagtaaatattttaggctttgcaggccatatggtctcttgtcacaactactcaaatatgctgttggagcatgaaaaccattacagaacagtacattaacaaatgggtgtgcagtgttccagtaagactttatttatggagactggaacttacatttctaataattttcaagtttaaacaaaatactatttttctttgtgttcaaccacttaaaaatttagaaaccacacttgagggccatataaaaacaagcagtgtgtcatagtttgccaatccctgttttaataattcaatggttctttaaagctgatgaatccagcagagccctaattatggaaaagcattgtggaagagagaaatcaagagccagccaatctgtcagctagttagcccgagcacagctatattaattactcccttgcctaacacaattcatgcaactcctttgagcttaaccttttcatctataaaaatggagtaatgatagatctccaacccatacctactttatcctggtgaagggagtttagtaataattaaataataattaaattactgaatttttatccctgtgctagatatttgagtcatttaagttctaatcttttattcccacttatagaggaagaaatggcgttcaggag

SEQ ID NO: 15 - DNA, 4127 bp, Homo sapiens
ttttttttttttttttttttttttttttttgatagggtcttgctgttgcccaggctggagtggcagtggcatggtcatggctcattgcaacctcagattcctggcctcaagcgatcctcccacctcaaccttctgagtagctgtgactacaggtgtgcaccaccatgcccaactatttttttatttttctagagatggggttttaccatgttggggagggaatcttttataacaaactgtacagatgaatcagatgaacaggcggggttggaaatgaggggccttgtgtatttaaccatatagaccattaaaatctatagtgttcattgtgttggggatccatttctcccagaaatgtcctatgtgttgcttaaggagctcccctgcctgcatggagactggaaagagggtttcgaggctgcccccaagcccattcaaagccagcactgttctctaaggttgtcagaccccaggaggttctaggctggaattttcctgggaatgttccttaggatgtctgctagaactggggtgctttagaagttagcgagcccagtggccttcaaacatgttttggctatggatcccttcaggaaatcttacctgaagtttcaacatgcaaatcagaggaaagcaaagctgtgtggttgaaactggcaaggggtgtctggagcctccccttagcctctcccttgagcttggaaaccatttaaacccaggcttctcacttcacagatgacgaaatagacccagaagcaaagtgaccaggtcaagagcccattgttgggctgtaggtctgcagtggattggattagggctttacagagaactgaacactgttacaagttatgtttggttagttgatatccgctgagttctgtaaaagggactccaccttctcctcaaggacctcagtgttggctggcctcaaccaagtggggaggtggcttgtttggggaaatatctctggagttaaacagacctggattaaaaacttggctccctcacttaatagctggtcttggggaagctgtttggcttcagtgtctacatccataacccagggctaacctccttgttttgcctagagtattgaatgagactttacaggcagagtggcaggacagtgttggcacaagagctgcccagtgagtggtggctgattttgtgcttctagtctatccctggtgcttgggttgtgggtgaggctgtgttgtccagagatctgggagtggctggctggcttgggaaagaatacctaaactagacttctcagcagccactgctagagccctgcccctaggctaaactcagctgttgcagagaagggtttagtaaaccaaagcaggatattttgatcagacatcaaatgggttttagagcttggcctacccctggagctctgtgcctcgcaggctgagacacacccatttctgggccctttgccaatcccgatgcccactttggggtgaggttgtgatatggaagtttggttcggggatggcgtaaggaaggatatctgttgcacatattatttagtaattttaaagggatcctacaattaatggtgtgtgtttcaccatttcttcaaaatagtgaaaatcaaaaagtcctggcatcaaaacgaaagggtctaatattgtgtcctctgattcttcagctaaaggggctgcctaggtggtcagacaagctgagggacacttggcatctttagtgagacagtctacatcgtgcctggaacccctttaggcctagtgtccgcctctattcagggtgttccagtaccctggctgatgaaaataccccatctttgtcagttggggtttatatacatatattttgtgggggagtgccatgaacccctctagcaggctacagaaggaccccttctcagaatgtttttacatacatgaaataacaccccacaaatatcaaaggaaataaattgcagtacagttaccaaaacataaagacaaatctgggatatggtaaggtatgtgttgctttagtaacacgtcaaataacaagatccagcagcaggtctaatatctaccaaaattgtgtggtagtgatgcacctgagtgatattttgcaattctgtaacaacaataatgtgttatgaaaataactgatttctgttgctgacaaacaaatacagccaatatttctatgatgcctacaaattgccttcataatggaagcaattgctaactttcagttagaggatagtgaaaagatagatgtcatttttcaagttcatggattacctgaattctgctcagtgctttatcctcaggttatgaacccctgtccagatccaaatcatcctagtcacctggagactaagttagaccgaagattttcctctttaccctgtgtgtggaatgagctgagcctcagtcagtggtgctaggcttcttgtgagataattgtactggctctggccagtagaaacaattttaaaacattcttggaaccacttttaaaagagtaaaaggcaggactgggtgcagtggctcgtgcctgtaatcagtgctttgggaggtcaaggtgggaggatggtttgaggccaggagtttgagaccagcttgggcaacatagtaagactcctggcatcgtggtgcgtacctagagtcctacttgggtggctgatgtgggacgatcacttgagcttgagagtttgagactgcaggagctgtgatcacaccactgcattcctgccttggtgacagagtgagaccctgtcacacacacacaaaaacaaaacaaaaaactcaaacaggtgaaatttatttttgcattatattttattcatataaactatccaaaatattattttaatatgtaattaatataaaattattcatgagatttttgcatgctttttttgtacagagtctttggtgtgtctattttgcattcatggcacatctcaatttggactaaccacatgtcaaggggctcaatggccacatgcctagtggccatgtcactgggcagcaccggtcaatatagttagaattatatcatgtcagggctgggcaaggctgcagttgaatcctattgttttacctaaggggaaattggggttcagagaaagaaggtgatttgtccaaggtcatggttagctagttagagagcaaggctttggttaggccctggtctagtggatgttctaccatcacactgccttttggtaaaggttatgttttcctagccctaagtctgatggaaggcaggagaaactcaggctttgggggttctgcctctgaaagcccagtgatgagtgatgccaggaggacagctaaccagagccaaggagaggaaggcctggaacatgaaggcttcagaggatatagtgatgggagatggggtcacctcatagcaggaagagtaaatgttttaaggaatggatgaagagaaagtgaatctctctcaaagaaatccagggtggagagaagtaaacagtaagttgccaaaaagaaatatgataaactggcaaaatatttgcaatgatattgaatagatgggaacacattaaagtccatttattccacagaggtttaagaggagatgactggaatgaatggaaggtggaaatgactggtaatcaaaggaaaagaggaggaaatagtagaatgctctagttcttacctaaaaacagataagggaagacaccagggaattgtccttttccttgcacctccatcatctaccccgagatgccaccctgacagcttgcttgtccatggcactgtgggtgtgtatggtgagtggcctcttctgcactggtggctccttgagagcccggagcatgtctggctcctcttagtgtccccaacacgtgggatggcaggttcctgctgcagagcaggtgcttggcaagcatttgaaaaacaaatgggaataaaggagtgagtgactgagggagagctgttctgcagcacaggacaggcacagagtcggggccctcgctgtactctcaacgccccactctttcctggggacatttgtagattgctcgcttctgtcagtcctcttcatctgagagatgagaatgtcatctctgcctcctcaatttagtggtttagaagaccatgtgaaataatcgatataacatgaattgg

SEQ ID NO: 16 - DNA, 4124 bp, Homo sapiens
ttttttttttttttttttttttttgcttccaattcagttatatcgattatttccatggtcttctaaaccactaaattgaggagggcagagatgacattctcatctctcagatgaagaggactgacagaagcgagcaatctacaaatgtccccaggaaagagtggggcgttgagagtacagcgagggccccgactctgtgcctgtcctgtgctgcagaacagctctccctcagtcactcactcctttattcccatttgtttttcaaatgcttgccaagcacctgctctgcagcaggaacctgccatcccacgtgttggggacactaagaggagccagacatgctccgggctctcaaggagccaccagtgcagaagaggccactcaccatacacacccacagtgccatggacaagcaagctgtcagggtggcatctcggggtagatgatggaggtgcaaggaaaaggacaattccctggtgtcttcccttatctgtttttaggtaagaactagagcattctactatttcctcctcttttcctttgattaccagtcatttccaccttccattcattccagtcatctcctcttaacctctgtggaataaatggactttaatgtgttcccatctattcaatatcattgcaaatatttgccagtttatcatatttctttttggcaacttactgtttacttctctccaccctggatttctttgagagagattcactttctcttcatccattccttaaaacatttactcttcctgctatgaggtgaccccatctcccatcactatatcctctgaagccttcatgttccaggccttcctctccttggctctggttagctgtcctcctggcatcactcatcactgggctttcagaggcagaacccccaaagcctgagtttctcctgccttccatcagacttagggctaggaaaacataacctttaccaaaaggcagtgtgatggtagaacatccactagaccagggcctaaccaaagccttgctctctaactagctaaccatgaccttggacaaatcaccttcgtttctctgaaccccaatttccccttaggtaaaacaataggattcaactgcagccttgcccagccctgacatgatataattctaactatattgaccggtgctgcccagtgacatggccactaggcatgtggccattgagccccttgacatgtggttagtccaaattgagatgtgccatgaatgcaaaatagacacaccaaagactctgtacaaaaaaagcatgcaaaaatctcatgaataattttatattaattacatattaaaataatattttggatagtttatatgaataaaatataatgcaaaaataaatttcacctgttttgagttttttgttttgtttttgtgtgtgtgtgacagggtctcactctgtcaccaaggcaggaatgcagtggtgtgatcacagctcctgcagtctcaaactctcaagctcaagtgatcgtcccacatcagccacccaagtaggactctaggtacgcaccacgatgccaggagtcttactatgttgcccaagctggtctcaaactcctggcctcaaaccatcctcccaccttgacctcccaaagcactgattacaggcacgagccactgcacccagtcctgccttttactcttttaaaagtggttccaagaatgttttaaaattgtttctactggccagagccagtacaattatctcacaagaagcctagcaccactgactgaggctcagctcattccacacacagggtaaagaggaaaatcttcggtctaacttagtctccaggtgactaggatgatttggatctggacaggggttcataacctgaggataaagcactgagcagaattcaggtaatccatgaacttgaaaaatgacatctatcttttcactatcctctaactgaaagttagcaattgcttccattatgaaggcaatttgtaggcatcatagaaatattggctgtatttgtttgtcagcaacagaaatcagttattttcataacacattattgttgttacagaattgcaaaatatcactcaggtgcatcactaccacacaattttggtagatattagacctgctgctggatcttgttatttgacgtgttactaaagcaacacataccttaccatatcccagatttgtctttatgttttggtaactgtactgcaatttatttcctttgatatttgtggggtgttatttcatgtatgtaaaaacattctgagaaggggtccttctgtagcctgctagaggggttcatggcactcccccacaaaatatatgtatataaaccccaactgacaaagatggggtattttcatcagccagggtactggaacaccctgaatagaggcggacactaggcctaaaggggttccaggcacgatgtagactgtctcactaaagatgccaagtgtccctcagcttgtctgaccccctaggcagcccctttagctgaagaatcagaggacacaatattagaccctttcgttttgatgccaggactttttgattttcactattttgaagaaatggtgaaacacacaccattaaattgtaggatccctttaaaattactaaataatatgtgcaacagatatccttccttacgccatccccgaaccaaacttccatatcacaacctcaccccaaagtgggcatcgggattggcaaagggcccagaaatgggtgtgtctcagcctgcgaggcacagagctccaggggtaggccaagctctaaaacccatttgatgtctgatcaaaatatcctgctttggttttactaaacccttctctgcaacagctgagtttagcctaggggcagggctctagcagtggctgctgagaagtctagtttaggtattctttcccaagccagccagccactcccagatctctggacaacacagcctcacccacaacccaagcaccagggatagactagaagcacaaaatcagccaccactcactgggcagctcttgtgccaacactgtcctgccactctagcctgtaaagtctcattcaatactctaggcaaaacaaggaggttagccctgggttatggatgtagacactgaagccaaacagcttccccaagaccagctattaagtgagggagccaagtttttaatccaggtctgtttaactccagagatatttccccaaacaagccacctccccacttggttgaggccagccaacactgaggtccttgaggagaaggtggagtcccttttacagaactcagcggatatcaactaaccaaacataacttgtaaacagtgttcagttctctgtaaagccctaatccaatccactgcagacctacagcccaacaatgggctcttgacctggtcactttgcttctgggtctatttcgtcatctgtgaagtgagaagcctgggtttaaatggtttccaagctcaagggagaggctaaggggaggctccagacaccccttgccagtttcaaccacacagctttgctttcctctgatttgcatgttgaaacttcaggtaagatttcctgaagggatccatagccaaaacatgtttgaaggccactgggctcgctaacttctaaaagcaccccagttctagcagacatcctaaggaacattcccaggaaaattccagcctagaacctcctggggtctgacaaccttagagaacagtgctggctttgaatgggcttgggggcagcctcgaaaccctctttccagtctccatgcaggcaggggagctccttaagcaacacataggacatttctgggagaaatgggatccccaacacaatgaacactatagattttaatggtctatatggttaaatacacaaggcccctcatttccaaccccgcctgttcatctgattcatctgtacagtttgttataaaagattccctccccaacatggtaaaaccccatctctagaaaaataaaaaaatagttgggcatggtggtgcacacctgtagtcacagctactcagaaggttgaggtgggaggatcgcttgaggccaggaatctgaggttgcaatgagccatgaccatgccacgcactccacctgggcaacagcaagaccct

SEQ ID NO: 17 - DNA, 3675 bp, Homo sapiens
tttttttttttttttttttttttttttgagacagagtcttcccatatcgcccaagctggagtgcagtggcgtgatctctgctcgctgacaatctctgcctcctgggttcaagccattctcctgtctcagcctcctgagtagctgggattgcaggggcccgccaccatgcccggctaatttttttatttttagtggagatggggtttcaacatgttggccaggctggtctcgaactcctgatctcaggtgatccacccgcctcggcctcccaggtgctgagattacaggcgtgagccaccatgcccggccaggcttgcccttttgaaagtaatatgtatatcctgaggaaactatcacatatttaaaagtattgaatgctatgcttcatattgactgtaatgtgggagtgcagaagaattttaataattttaaacatacttcgtcctcttaagatgcttagaaattggaaaaagtcaacaaatataagtgagagaataatcaaatgcacagctgtgtacagtggaaataccaagaaggaagagagcagtgtacttttaaggagtttagaaagttctcatggaattgttggcatttgagcgggtccttgaagaatggacaagacttaaatgtgcaaagaaaatggaagagtaggacctgagcccaaggcacagaagtgggaatgtgggtgtcatatgaagagaccttcctggatgaattgcagagtttggaaaagcgtaaataagccacatttgcctacaaagcaagcttcaatccatatgcaatgtgcagaagagttaaagtaaaaaataaaagtcctcatccccccaacaatcccattcactagaggtaactactagtaagaatttcatgtacatatttttccagaaattgtatcatactctgcatacagttctgcatcttgattttagtcacttagcagttcagtgttttaagacatctcgtatcagtacctcttgctgtaccccactgggtttttcttctgtgattgggtagttgtcaatcacagtgaatgaatatatcataattttgcattttccaattacttggttggcttcaagttttgttgattacaaaaaaaaaattctgaaaacctatgcacatcctcctattcgcttatgcgaatatatctatgggatgtatttttagaaattgctctgccaaattacattttaaatttaagcattaccagttgctcatcaggagggttatatcatttttaagttctctccaacagtataggaaaatacctgtttacatgaatgcttataaacctgtattcattcactgtttaattaagagtagccttgccaagcacagtggctcaagtctgtaatcccaacactttggcaggctaaggagagtggattgcttaagcccaggagttcgagaccagcctgaatagcataggtagacccccgtctttacaaagaatagaaaaattagccgggcgtggtggcgcacacctgtaagtcccagctactcgggaggctgaggcaggaggattgcttgagcccaggaggttgaggctgtagtgagccatgacagcaccactgcactctagcctgggggacagagcgagaccctgtctcaaaaaaaagtcatcttattagtaataatattcattgttactaatcttctctgtgaaaaaatagcttctaggttgttctcatttttgtttgttggttggtttgttttttgagccaggatctcactgtatcgcccaggctggagtgcgatggtgctgtcatgcctcattgtagcctcaacctccctggcctggcccaagggatcctcctgcctggctaatttttaaatttttctatacatacagggcagaggttgtggggggtggtgttcactttgttgcccaggttgatcttgaactcctgggctcaagcaatcttcccacctcggcctcccaaagtgcttccattataggcatgagccaccatgcccagcttctagttttgtatgtaattatgagtgaggttgaacaactttctttttctattaagcttcctgtttatatcttttgccacttttctcttagattatatttgtattgtgattttgtgggagtttattgtatatttaggaaattaacccttcatgtttactgctgtagtttttctcagtttgtcatttgtttgtatagccgtttatttattttcatagtatggtaaattttaacccgttatgaagccagatttatttgggtttttttctttatgacttctgttttcggttaggcttaagaaggccttacccactctcagattctaaaaatatgtttttcttctagtaatttattatattttaatatttgaaatttgcttcatctattattcattttaaagtaagtggtgatggccgggcacagtgggtcacgccagtaatcccagcactttgggaggcggaggcgggcggatcacctgaggccaggctggccaacatggtgaaaccccatctctacaaaagtacagaaattggctgggcatgatggcgggtgcctgtggtcccagctacttgggaggctgaggcggaggctgcagcgagccgagatcgtgccattgcactccagcctgggcgagacagtgagactccatctcaaaaaaaaaatgtaagtgatgatgtcagaatgcaatttccccacaaataattagcaaattttcacaacaattttgaatcatccttttcccccactgatttgaaatgccactgatatttctatttctgttcagtaccaagctattttggttaactgtagtttcgaaatttaataactggtagggctggtctcattcttctgtctcaggtttttccaaagtactctcatcccttggtctgtggggaaccggtcctaggacctctctcatataccaaaatccacagacgctcaagtccctggtataaaatggtatagaattcacatataacctatgcacatcctcctgtatgttttaaatcatctctagattacttagatgagactatctaatactatgtaaatagttatactgtattgtttaggaaataatgacatttttaaaagtctgtacatgttcagtacagacacagtctttttgaagtattttttatccctcctttgttgaatccatggatgcagaacccatggatatgaagggctgactatattctcacagttatattcaagttgtattttgaatgattttatgacaatcttttaccaaagggccaactgtattctcatgtttattattcaagttgtatgacaatttcatatcagccccccagagagttggcatttggattgaaatcatactgagtctctagattaatttagggagaagtgacatctttataattttgaatcttcctatccatgtatatgcgagtgttttgtatttcagtggcattttcaaattttcttcaggtaggtctcttagtgtttattccaaagcatgtcatctgttaatgcttttgtgaatgaaatgtttacctccattatgttttctgattgtacataggaaacatcctgatttgaattacaaatattgtaaccagtgccttatctaattattttatgaattttaatagttttctggttgttctttggagtttcaagtgcacaattatataaattgcaaataaagatcatttactcttctcatt

SEQ ID NO: 18 - DNA, 3669 bp, Homo sapiens
ttttttttttttttttttttttttttgcgaagaggtaaaatgatctttatttgcaatttatataatgtgcacttgaaaactccaaagaacaaccagaaaactattaaaattcataaaataattagataaggcactggttacaatatttgtaattcaaatcaggatgtttcctatgtacaatcagaaaacataatggaggtaaacatttcattcacaaaagcattaacagatgacatgctttggaataaacactaagagacctacctgaagaaaatttgaaaatgccactgaaatacaaaacactcgcatatacatggataggaagattcaaaattataaagatgtcacttctccctaaattaatctagagactcagtatgatttcaatccaaatgccaactctctggggggctgatatgaaattgtcatacaacttgaataataaacatgagaatacagttggccctttggtaaaagattgtcataaaatcattcaaaatacaacttgaatataactgtgagaatatagtcagcccttcatatccatgggttctgcatccatggattcaacaaaggagggataaaaaatacttcaaaaagactgtgtctgtactgaacatgtacagacttttaaaaatgtcattatttcctaaacaatacagtataactatttacatagtattagatagtctcatctaagtaatctagagatgatttaaaacatacaggaggatgtgcataggttatatgtgaattctataccattttataccagggacttgagcgtctgtggattttggtatatgagagaggtcctaggaccggttccccacagaccaagggatgagagtactttggaaaaacctgagacagaagaatgagaccagccctaccagttattaaatttcgaaactacagttaaccaaaatagcttggtactgaacagaaatagaaatatcagtggcatttcaaatcagtgggggaaaaggatgattcaaaattgttgtgaaaatttgctaattatttgtggggaaattgcattctgacatcatcacttacattttttttttgagatggagtctcactgtctcgcccaggctggagtgcaatggcacgatctcggcttgctgcagcctccgcctcagcctcccaagtagctgggattacaggcacccgccatcatgcccagctaatttttgtacttttgtagagatggggtttcaccatgttggccagcctggcctcaggtgatccgcccgcctccgcctcccaaagtgctgggattactggcgtgacccactgtgcccggccatcaccacttactttaaaatgaataatagatgaagcaaatttcaaatattaaaatataataaattactagaagaaaaacatatttttagaatctgagagtgggtaaggccttcttaagcctaaccgaaaacagaagtcataaagaaaaaaacccaaataaatctggcttcataacgggttaaaatttaccatactatgaaaataaataaacggctatacaaacaaatgacaaactgagaaaaactacagcagtaaacatgaagggttaatttcctaaatatacaataaactcccacaaaatcacaatacaaatataatctaagagaaaagtggcaaaagatataaacaggaagcttaatagaaaaagaaagttgttcaacctcactcataattacatacaaaactagaagctgggcatggtggctcatgcctataatggaagcactttgggaggccgaggtgggaagattgcttgagcccaggagttcaagatcaacctgggcaacaaagtgaacaccaccccccacaacctctgccctgtatgtatagaaaaatttaaaaattagccaggcaggaggatcccttgggccaggccagggaggttgaggctacaatgaggcatgacagcaccatcgcactccagcctgggcgatacagtgagatcctggctcaaaaacaaaccaaccaacaaacaaaaatgagaacaacctagaagctattttttcacagagaagattagtaacaatgaatattattactaataagatgacttttttttgagacagggtctcgctctgtcccccaggctagagtgcagtggtgctgtcatggctcactacagcctcaacctcctgggctcaagcaatcctcctgcctcagcctcccgagtagctgggacttacaggtgtgcgccaccacgcccggctaatttttctattttttgtaaagacgggggtctacctatgctattcaggctggtctcgaactcctgggcttaagcaatccactctccttagcctgccaaagtgttgggattacagacttgagccactgtgcttggcaaggctactcttaattaaacagtgaatgaatacaggtttataagcattcatgtaaacaggtattttcctatactgttggagagaacttaaaaatgatataaccctcctgatgagcaactggtaatgcttaaatttaaaatgtaatttggcagagcaatttctaaaatacatcccatagatatattcgcataagcgaataggaggatgtgcataggttttcagaattttttttttgtaatcaacaaaacttgaagccaaccaagtaattggaaaatgcaaaattatgatatattcattcactgtgattgacaactacccaatcacagaagaaaaacccagtggggtacagcaagaggtactgatacgagatgtcttaaaacactgaactgctaagtgactaaaatcaagatgcagaactgtatgcagagtatgatacaatttctggaaaaatatgtacatgaaattcttactagtagttacctctagtgaatgggattgttggggggatgaggacttttattttttactttaactcttctgcacattgcatatggattgaagcttgctttgtaggcaaatgtggcttatttacgcttttccaaactctgcaattcatccaggaaggtctcttcatatgacacccacattcccacttctgtgccttgggctcaggtcctactcttccattttctttgcacatttaagtcttgtccattcttcaaggacccgctcaaatgccaacaattccatgagaactttctaaactccttaaaagtacactgctctcttccttcttggtatttccactgtacacagctgtgcatttgattattctctcacttatatttgttgactttttccaatttctaagcatcttaagaggacgaagtatgtttaaaattattaaaattcttctgcactcccacattacagtcaatatgaagcatagcattcaatacttttaaatatgtgatagtttcctcaggatatacatattactttcaaaagggcaagcctggccgggcatggtggctcacgcctgtaatctcagcactttgggaggccgaggcgggtggatcacctgagatcaggagttcgagaccagcctggccaacatgttgaaaccccatctctactaaaaataaaaaaattagccgggcatggtggcgggcccctgtaatcccagctactcaggaggctgagacaggagaatggcttgaacccaggaggcagagattgtagcgagcagagatcacgccactgcactccagcttgggcgatatgggaagactctgtc

SEQ ID NO: 19 - DNA, 4730 bp, Homo sapiens
aagcagtggtatcaacgcagagtacttttttttttttttttttttttgagacggagtcttgctcttgtcacccaggctggagtgcagtagcatggtctcggctcactgcatcctccgcctcccaggttcaagtgattctcctgcctcagcctcctgagtagctgggattacaggcgcttgccaccacgcctggctaatttgtttgtaattttagtagaggcaggggtttcaccacgttagccaggctggtctcgaactcctgacctcaggtgatctgcacgccttgacctcccaaagtgctgggattacgggcgtgagtccccacgctcagccactgtatcctttactcagtgtcatcaagttcaaagctctgaccaccctggtttctctgccaaagcctcatctacttccagctgggctttgaacttgtggtttttaagtgctggtttctctgctgcctttggaaaatagtgaccatcatgctggtctgtgctgacgcagactgggagctggaagagacaagctccctctttgctctcattggccaaagatgttgctaataaccctgtgatcctagcttccttctaggatgatagcctctgacaggcaccatgccaggaggaaactagagcatctttatcactgaaagatagcacgtttctagccacaggttctgaagttgatttgaggttaaaatccaagaacctttgatagttttcagccaagatagtaatcagaaagtagatgaagcagagactgggtttgggaagtggttgggttctgggaaggctcttcctagctctgcagttagatcctgtgaggacccagctgatagagtaaaggctttgggtgttggagacttcccatcagccacccatcatgagcctggtgtgtttcctttgctttgtagctcctttgggggtatgctgctttttccatttctcttggctcgggtactcttccattgcagcaagagaagccacagtgggctgttccccaagcagccctggcacagagaggcagagtagagaatgctaaactggccccatgtctcctccagccacttcctgaggagcagttctggcaggagtgttaaccatattggcagcagcttccatccagagagactttgaaagcaacttgagctttccactgcagggcttggaggcatatgaaacctgtggggcctgcccctactcacctcacccctgagctctgtccaagccctggacctcctgtcctcggcctgtgtttggtactcacccactttctacttctgagtagaatcaagggcagcatttggtcccattataccagccatgcatcatctgtgaacaggccttattgagcttatcttggcagaggaaagtcaggcaggcaagacccactctaaattttaatgtttccccctcattttagggtgggagctgtgagttcatctgaagactgggtgagggcattgtaagctcaagccacagcctcttttccacctccattaaatggactgttagggatgcccagcttccccaatttcctgggagggtgtgtgggtctgtacaggcaaccttgtgtcattctttcaatttccggctcaccattgctggcaacagtgggaagatgaccagagaaagtttggccccctctcccaagcttccaggcctctttccttttcaagaaatagttgagtcaccagcatctgtatctggcattttgtttcttcacatttgcaaccatttcagggtagagttttttgtttgtttgtttgtttgtttttgttttttttgttttttctttggaaacagagtctcactctgtcccataggctggagtgtagtgctgtgatcatggctcgctgcagcctcaaactcctggactcaagcagtcttcccatctcagccttccaagtagctgagactaaaagcgtgcaccaccacacctggctgatcttttaatttttttggagagacagggcctcactatgttgcctaggctggtctctaactcctgggatcaagtgatcctcctgcctcagcgtcccaaagtgttgggattacaggtgtgaaccaccatgcctggcccaggatagcactttttcctttcttctgctctcagttggttggaccactggttgcatctcttcccactctccctgaaaggcacagaactatcagacagaagacaaggtagttctcaagaagtaccaggcagctgtgtctgctagaggcttcctcagcaaagccccatcttgtggacaacctctcaggaattgcaggtggtgtgggagtggctgacagaggagggatccatatgtcttagaccaaagccaccagtcaggccttgccaccatatagaaccttccctttagaatatatttatttggaattttacttatagctgcaaatatatcattggctactatacccaagcatcaactcaaggaacatttggttttctggtgagcacagctgaagaccaaccaactagttactgatccagatgagggaagagaacatttattcagtcattctgttatgctaactattcattttctcatgaaaatgtagtctttggctgggcatggtggctcatgcctgtagtcccagcattttgggaggccaaagcgggcagatcatgaggtcacgagatcgagaccctcctggctaacacggtgaaaccccatctctactaaaatacaaagaattagccgggcatagtggcaggcacctgtggccccagctactcgggaggctgaggcaggagaatggcgtgaacctgagaggtggagcttgcagtgagctgagattgtgccactacactccagcctgggcgacagagcaagactccgtctcaaaagagaaaatgttgtctttgccaggcagtgtggtaggcccaagagatatagcaattagagttgactaagacagtgtccctatcctgttcttgagctccagttctagtgggagttcttgagcttggtaagatgatgtgagtccatcagtggcccaggactctaagcatgtatgttttagtcccagctgtaaatgaggattccattaaccccatcttctccaatgtatggaggatgcaagaagctttaaaatgtccttttctcacagtgacttcccttgaccatgccttagtttcctcagccagaaattggagacagcaagagcacttatgcctgagttggtgagatggaatgatgtatcatatctcttccccttttattaaccagatcgtttaccagattgtacctggtgatgctggcagccagccctcttccggcccctatttctgcttaccgtgttaccagagagcctgggggtctggatcctatctggccccgtcagggtggattaccaaatgagcagttctcttgccccagtccctttcctgtgctataaataagccccatgtttattttcttatgttattgaaatgagcacttgtgatttgggcctcttttgaggagtccagagagcgtccatccggtgcctggtgagggccctgcatggctggctgctgtctgaagctatttggagtcctctccctgtgttttctatgtggcttaatttcaatagaaagggttatatgcaaccctgtatctgctgattttcaggtttcaactttctgccagcgtcactgcctgcttagaagtaaagttatgtttctcattaaggggataacagccacaattgaggtaattaacgaaaattgtacattggtggcagcacctcctataggatttccagtagtctttctctagtagatcattgggggctcaccttgatctcctctcttctgtctaccctgcaccaaaataccttgtcctgttttctggatatagttccaataatttttttcctaacagcctttttgtcaccagttggtttgatatcttacaacttggccaaatgagggttccattaactccatcttgtctaatgcatggagaattcaaggattttttttttcctcttttcatagcaccttccagttgccagttgtaccctggcccttctttggaagtcataatgatgaatatccattaataagagattgatgctctttcaactctcatgtcatctataccatctcagtggagaggatgactttggatgaggttggaatagaaaggaaacatttggaagtccactgcagtgtattatatgctgtgtggaagtctgggggttaggaaatacctggagggagaacttcctaagaaatgatttttggttcttttaggccttaacagcacaataaaagtatcccatgagaccattatgagcaggacacgacattgtttcacaccttgggctgtgactatttacttctcggtacagattactctggttaaatcactcagtaaagaaatcttttcatgctcacaatctgaacctgaaggctattactgaagagaattgcatctgacaacaaaatttaatttacttccagagaaaggaccagaagaaagtaaattttcatttatgtttttaagtctattgtcttaaaaagattcttttcccttaaaaaataaaaaaacctgatgtgatgggttccttcagtcaacaaatacttattgagcagttattgtgtgccagatactgttcttggtgtgaggatatggcactgaacaaaacaatgtacctactttcgtcaagcttacattctagtgaggaagataaccaaaacaagtgactgaatataatttcaaatgtcaataaatgctg

SEQ ID NO: 20 - DNA, 3851 bp, Homo sapiens
ttttttttcttttttttttttttttgagacagggtcttgctgtgtcacccaggccggagtgcagtagtgtgatcatggcttactgcagcctcgacctcccgggctcaagtcatcctcttgcctcgccttctgagtaggctgggactacaggcatgcaccaccatgctcggctaattttttaattttttttaggggaaggggtctccctatgttgcccaggctggcctcaaactcctgggctcaagcagtcctcctgccgtggcttcccaaagttctggcattacaggtgtgagccactatgcctggcctcatcacattcttaaaccaagaaaagttaacccacttttcttaacccactgtgttagacactagtgctggttgtcagtgaaaaactccaaagtaacatgtggatcttgttgcttacacattaagacaaaatgccaattttgggggctgggggaataaggcatcaagtttgccccatgtgtagattcactcgtgtctgaccaagtgcaccctcggagtgttgcctacacagaggctggcttttctctaacgtccttcttttccgcagatcttcagaaaggctttctctgatagggcagtatgttaattcctgtgattgctgtaacaaaatacctcaaactggggggcttaaagcaacagaaagttgtgctctcacagttccggagtccacaggtctgaaatccaggtgtgggcagggccgtgctccctccgaaggctctaggggaggatccttgctcaacttatttttgagacagtcttgctccctcacccacgctggagtgcaatggcacgatctcggctcgctgaaacctctacctcccgagtagctgagattacaggtgcccgccaccacgcccaactgatttttgtatttttagtagagacagggtttcaccattggccaggctgatcttgaactcctggcctcaggtgatccgcccgcctcggcttcccaaagtgttgggattacaggcctgagccaccacgcccagcctgcctttcttttctgaggacagttggcacctataatctcatctcaagatcgttagttatatgtacaaagacccttttttcccaaataaggtcatatttacaggttccaggtggacgtatattttgggggaggtcaccattcaaccctctgcagaccatctgagtcccctttccttgctctacaagcatttaatgagcacctcctattggccagccctgaactggcagccagggatccagcaatcaacacaacaggatcagccaggcccggtgactcatgcctataatcccagcactttgagaggctgaggcgggcaggatcacttgaggtcaggagtttgagaccagcttggccaacatggtgaaaccccatctctactaaaatacataacttagctgggtgctgtggctcacgcctgtaagtcccagcagtttgggaggttgaggcgggtggatcacttgaggtcaggagttcgagaccagtctagccaacatggcaaaaccccgtctctactaaaaatacaaaaaatgagctgggcattttttgtatgaggcgggcgcctgtagtcccagctactcagggggcacgagaatcacttgagcccgggaggtggaggttgcaatgagctgagatggcaccactgcactccagcctgggcgacggagcgagactctgcctcaaaaacaaacaaacatacaacacagtaggctcactgctgctgtgaaagttcacagtctgttgggagatggctaagtaacaggtggtcatggtgccaaaggagaagtggggcaggtgtccaaaggaagggtggggagggcttcccaaaagacgtggcttctaaactgtgtcccaggaggtgagtaggggttaccctgagaggtggacttaccctgagggcagcagagagcccctgaaggtccaagagcaggagagcagccatgcccagctgcctgtgaagctgccacctcctctccctccacaccctgacactcagggacacgcccccgcagcccacactcccaggaaaagcattcctctagcggaccttctggttacttttatagataactttgtggccggccctccaccacctctgcagaaacaacaccctcaccccacgaagcccgacctgttctctccctggctgactttgaagccgtggttgtagcagagtgggtaggttctgatgatgggtagagaaggcagaggccagagcgaggcagccaaggccaggaacgccaggagccaccagaagctggaagggccgaggaagtatcctctggagcctccaggggagcatagccgtgctcacacctggatttcagacttgtggactctggaactatgaaagcataacttcaaagcatgttcctgagagtggggcaggtaccactccagggggcctggagtgagttgcagggaatgggaataggtagagaaggcatctcggggacagggttcagctgagggcaaggctaccttcaggcgggaccatgacttgcagccgcacagcacaggacacatagtctgagctaaagaatatttgcttaatgagtgagcttacatcatatgtatataaaatctagaaacatgtctggtttgctgaagactgactacgtgggtgggtgctgagccccatttcaactgtaaatgctaactcattgcaagagacagaaggtcattgtcttttaagcagaggcctgaaagccagttccggcatcggaacctaacgaacaaacacgggaatccaaggccatcatagcagcagtggtcacaattactgagccttactctgggccaggcactataagccagggagttctcacgacagccagaattgatggggttgttgtccccatttgacaagtgaaaccggtgcagagagatggcatgccttgcccaaattcacaaggctattagtgggaggagtcaagagactttaagggccctttctctgtctacgaaagcaataaacaatcaaagataaagcataatgttattcaaagaacagtcagtgactttctttggttcataggaacctggctatggttgggatggaagggggtaaaatcccaattaccaggccctccttgtaccaaatgaattaatactaatgaggttgagtcttaagactctgtattgaaccaggcaccttctcccctacccccatgatatggtttggatttgtgtcccccaagtctcatgtcaaataataatccccagtgtggggcctggtaggaggtgattgaatcatgggagcggtttctcatgaatgctttaacaccgtctccctgggtgccgttctcatgatactgagtgagttctcatgagatctggttgtttaaaagtgcgtggtggctcttgcctgtgatcccgcacttttggaggccgaggtgggcggatcacgaggtcaggagatcaagaccatcctggccaacaaggtgaaaccccgtctctactaaaatacgaaaattgactgggcgtggtggctcatgcctgtggtcccagcttctcgggaggctgaggcaggagaattgcttgaacccgggaggaggaggttgcggtgagccaagatcacaccactgccctctgacctgggcgaccgagtgagactccatctcagaaaaaaaaaaaaagaaagagaaaaaagcatgtaacaccttccccctctctctcttcctcctgctctggccacgtaagatgtgcctgcctccccttcaccttctgccatgattgtaagtttcttgaggcctccccaggagcagaagctgctatgcttcctgtatagcccatggaaccagaacaattaaaacctcttttctttatgaat

SEQ ID NO: 21 - DNA, 3645 bp, Homo sapiens
tttttttttttttttttttttttttcctgagatggagtctcactcggtcgcccaggtcagaggtgcagtggtgtgatcttggctcactgcaacctcctcctcccgggttcaagcaattctcctgcctcagcctcccgagaagctgggactacaggcatgagccaccacgcccagtcaatttttgtatttttagtagagacggggtttcaccctgttggccaggatggtcttgatctcttgacctcgtgatctgcccacctcggcctccaaaagtgctgggattacaggcaagagccaccacgcacttttaaacaaccagatctcatgagaactcactcagtatcatgagaacggcacccagggagacggtgttaaagcattcatgagaaaccgctcccatgattcaatcacctcctaccaggccccacactggggattattatttgacatgagacttgggggacacaaatccaaaccatatcatgggggtaggggagaaggtgcctggttcaatacagagtcttaagactcaacctcattagtattaattcatttggtacaaggagggcctggtaattgggattttacccccttccatcccaaccatagccaggttcctatgaaccaaagaaagtcactgactgttctttgaataacattatgctttatctttgattgtttattgctttcgtagacagagaaagggcccttaaagtctcttgactcctcccactaatagccttgtgaatttgggcaaggcatgccatctctctgcaccggtttcacttgtcaaatggggacaacaaccccatcaattctggctgtcgtgagaactccctggcttatagtgcctggcccagagtaaggctcagtaattgtgaccactgctgctatgatggccttggattcccgtgtttgttcgttaggttccgatgccggaactggctttcaggcctctgcttaaaagacaatgaccttctgtctcttgcaatgagttagcatttacagttgaaatggggctcagcacccaccacgtagtcagtcttcagcaaaccagacatgtttctagattttatatacatatgatgtaagctcactcattaagcaaatattctttagctcagactatgtgtcctgtgctgtgcggctgcaagtcatggtcccgcctgaaggtagccttgccctcagctgaaccctgtccccgagatgccttctctacctattcccattccctgcaactcactccaggccccctggagtggtacctgccccactctcaggaacatgctttgaagttatgctttcatagttccagagtccacaagtctgaaatccaggtgtgagcacggctatgctcccctggaggctctagaggatacttcctcggcccttccagcttctggtggctcctggcgttcctggccttggctgcctcgctctggcctctgccttctctacccatcatcagaacctacccactctgctacaaccacggcttcaaagtcagccagggagagaacaggtcgggcttcgtggggtgagggtgttgtttctgcagaggtggtggagggccggccacaaagttatctataaaagtaaccagaaggtccgctagaggaatgcttttcctgggagtgtgggctgcgggggcgtgtccctgagtgtcagggtgtggagggagagggaggtggcagcttcacaggcagctgggcatggctgctctcctgctcttggaccttcaggggctctctgctgccctcagggtaagtccacctctcagggtaacccctactcacctcctgggacacagtttagaagccacgtcttttgggaagccctccccacccttcctttggacacctgccccacttctcctttggcaccatgaccacctgttacttagccatctcccaacagactgtgaactttcacagcagcagtgagcctactgtgttgtatgtttgtttgtttttgaggcagagtctcgctctgtcgcccaggctggagcgcagcggtgccatctcagctcactgcaacctccacctcccgggctcaagtgattctcgtgcctcctgagtagctgggactacaggcgcccgcctcatacaaaaaatgcccagctcattttttgtatttttagtagagacggggttttgccatgttggccagactggtcctgaactcctgacctcaagtgatccacccgcctcaacctcccaaactgctgggattacaggcgtgagccacagcacccagctaagttatgtattttagtagagatggggtttcaccatgttggccaagctggtctcaaactcctgacctcaagtgatcgcccgcctcagcctctcaaagtgctgggattataggcatgagtcaccgggcctggctgatcctgttgtgttgattgctggatccctggccgccagttcagggctggccaataggaggtgctcattaaatgcttgtagagcaaggaaaggggactcagatggtctgcagagggttgaatggtgacctcccccaaaatatacgtccacctggaacctgtaaatatgaccttatttgggaaaaaagggtctttgtacatataactaacgatcttgagatgagattataggtgccaactgtcctcagaaaagaaaggcaggctgggcgtggtggctcaggcctgtaatcccaacactttgggaagctgaggcgggcggatcacctgaggccaggagttcaagatcagcctggccaatggtgaaaccttgtctccactaaaaatacaaaaattagttgggcgtggtggcgggcacctgtaatctcagctactcgggaggcagaggtttcagcgagccgagatcgtgccattgcactccagcgtgggtgagggagcaagactgtctcaaaaataagttgagcaaggatcctcccctagagccttcggagggagcacggccctgccccacacctggatttcagacctgtggactccggaactgtgagagcacaactttctgttgctttaagccccccagtttgaggtattttgttacagcaatcacaggaattaacatactgccctatcagagaaagcctttctgaagatctgcggaaaagaaggacgttagggaaaagccagcctctgtgtaggcaacactccgagggtgcacttggtcagacacgagtgaatctacacatggggcaaacttgatgccttattcccccagcccccaaaattggcatttttgtcttaatgtgtaagcaacaagatccacatgttactttggagtttttcactgacaaccagcactagtgtctaacacagtgggttaagaaaagtgggttaacttttcttggtttaagaatgtgatgaggccaggcatagtggctcacacctgtaatgccagaactttgggaagccacggcaggaggactgcttgagcccaggagtttgaggccagcctgggcaacatagggagaccccttccctaaaaaaaattaaaaaattagccgagcatggtggtgcatgcccgtagtcccagctactcagaaggctgaggcaagaggatgactcgagccctgggaggttgaggctgcagtaagccatgatcacaccactgcactccggcctgggcgacacagcaagacctgtct

SEQ ID NO: 22 - DNA, 3921 bp, Homo sapiens
ttttttttttttttttttttttttgatacagggtctcactgtcacccaggctgcagtgcagtgctgtgatctcagttcactgcaacctccgtctctcaggctagagtgatcctctcacctcagcctccagagtagctgggaccacaggtgtatgcaaccacacctggctaatttttgtattttttagtggagatggagtttcatcatgttgctgaggctggtctcgaactcctggcttcaagcaatcctcctgcttcagcctaccaaggtgctaggattacaggagtaagccatcgtgcctggccttgccctacaatcttaagattcatttacaaagccactgttgtataaagcttgtacaaaatgagtacaagtcacacgtgggagctcaaaggagggattgattgtatacaccgaacagtgtgaattgggtagattagggaaagctttttttccttttttttcttttgcttaaagtgatggatacttaatattaggtaaagttttatagaaaactttgagcctagtcttgaaggatgaagcaggggaagaggatttcacatcaggatgaggcaaagcagagctgcaaaaagtactaggcatgttcgtgagtcgttgtcacaactggtgggactagatcaggacatggaaggctccggtgagacaggcagaaaggtaattggtttgaggagggctgcatttggcacttggctttcctacccccagtctccctcttggtcagattgaccaggaatcacaatggggccatctgaaaaatatgtcctagagatacttgagtggaatatttaagagtggaatatgtaagctttttagacttagtaagtagatttactaaattcatatttatttatatgaagacataatgtcttcagtttcttttttaaaaaacagctgtattgagataaaatttacgtaccatagaattcacccatttaaggtgtgtgattcaatggtctttagtgtattcacaaataagtgcaattattgccagttaatctgagatcatttcatcacttcaaagggaaacgttatctgctcccccatagccccaaacagccatttatctaccttctgtgcctatagatttaactatgttggactttcacacaaatggaattggacttttgtggctggcttctttcacttagcataatgttttcaagatgcatccaagttgtagcatgtatcagtacttaattcttttttgaggccaaataatattctattgcatggatacaccacattttgttgatcgagtgtctgattttaaaaagccaaccagtccagccaaaaccgaacgtatcagtttaggattgtaggatacgagcacaaagtgaagggaagtaggtgtgggagggctttccagagaaaagacattcttgaaaaaaactggcgatgataccattcatttctggaggggcctgcagaatgcctgcaaaatagattgattttactgagtctcatggtaggtgtccaaacacattgaagtcaggcttgctttcttgaccctatcatgaccatctttattagcatcaataaatattcattaatcatgtattatgtagagaacattgtcctaaaaaccaaaatgtaagttggtataagatgaagtgtctacagtctagatgtgagacaagatgtatgcataaaaagaaataactaggctgagttatttgagccctttatagctgctaaagacttttactaatctcttcatatgttatattgtcattgtttagaatcagctttttcgactgaactgaggaagagggcctaattttttacaaaaggagtacagtaatgtgtgaaaagtagcgtatgctaagtgtcaatgatggtatgtgctacaggaattgagagaagaggaccatcaccggagctggggagtaggaaaggattgatgagacattatttaggccttacagaaatgccaggcacagtggctcatgcctataatcacacatactaggtgggagattcacttgaacgcaggagtttgaagctgcagtgggctttatgattgcggaactgcactctagcctaagtgagagagtaagactccatctttgaaaaaaaaaaaagataggtgaagaggacatggcagaagccattacatacagatgaatccaggaatgtttaatcattgaacaaactgaaatgcttaaagtgaagaaataaatgggaagatgggcagcaagctggagaggagctctgattccaggctcaagagtaggaccttagggccaggtgcggtggctcacgcctatatcccagcactttgggaggccaggtgggcggatcacttgagcccaggagttcaagaccaagttcgagaccagcctgggcaatatggggaagcctcgtctctacaaaaattacaaaaattatctgagcatgatggtggttgcctgtggtcccagctacttgggaggctgaggtgggaggattgcttgagtcggggaggctgagccttcagtgagccatgatggagccactgcgctccagcctgagcaacagagtgagaccctgtctctcaaaagcaaaacaaaatgaaagagtaagaccttattttctaggcaagatggcagccattgacagtttttaacgaaggactggtagataaaaattgcactgtagtattttggtggctagaagcctgactaaaagagaggcttgttttgatagtagaattactttcacccaaaattaactgtacagaatagcacaatggttggtgttaagtatttaattttagtcaggttggggtcttctgtagtgttttaaagaataaattagccgggcacagtggctcatgcctgtaatcccggcactttgggaggccaagacaggaggactgcttgagttcaggagtttgagaccagcctaggcaacatagtgagaccttgtttctacaaaaaatttaaaaattagctgggcatggtggtgcacacctgtaggtcccagctattcgggaggctgaggtgggaggctggctcaagcctgggagatcgaggctgtagtgacccatgatcataccactgcactccagcctaggtgacagagcaagactctgtcacacacacacacacacacacacacacacaaaaggaataagctgttataaaatagaatgtagaggcaaaagtgcaaacaacttagagatgaaaatatacacttaagtcaatagtttccccttctttttatataaaattgtgaataggtatataatcacatagttcaaaaattaagcaacataaaatgtgtatagtgagaactctcacccctatcctgtcctcatatgcccttccttccccacccactggtgaccactgttattagtttcttttgcattcttccaggatctatacaaatataaacaaatacaaattctatttttcttctcttattataaacagcagttagtatgttatatatactttctgtatcttgctattttattttaacatatcttggagatcttttcacatcaatgaattagtgtgccttcttgatgacttacatcaatgctgccaaggatatatgtctgtcacctccagttttttagaagcaaagggagaatatggtcttaattttttttgccacttctcagttcgtttgttgattactaataggaatagacacaaagaggtaatgccacctgctgctcctttaaagcaagaagttgggaagaagagagctattcattctgtgctgtgccttctgcctaattcaatttggcttagatttgtgttgccttttttttcttgtaaataggcccctgattttcataataatgttttgtttctcagggatgccttcgaacaaacactggttatctgcttggtttttctgttactgtaaatttggattttaataaaataaaattttcctgtctttaat

SEQ ID NO: 23 - DNA, 2257 bp, Homo sapiens
ttttttttttttttttttttttttttttacagtttttgatatgctttattttgggtatgtagtttaccaaatataaaggaaatataaggagtgttctctttttttttaaataaaaagtgtatttttaactgggcatggtggctcactcctgtaaccccagcactgtgggaggctgaggctggtgaatcgcctgagtccaggagtttgagaccagcctgggcaacaaggtgaaaccctgtttctatcaaaaaaaaaaaaaaaaaaaaaaaaggaaaaaaaataagtcaggcatggtggtatgcacctgtagtcccagctacttgaaggctgaggcaggaggatcgcttgtgcctgggaggttgaagctacagtgagctatggtcaagctactgcactccattataggcaaccctatctcaaaaaagcaaagcaaaacaaaacatttttccccttgattatagaggtttgagaaaaatttgagggaagattcagaaaattacctgtaactgaacagaatgccaccagcttgggcttattctgcatgcataattatgaacattttcccagctcttgtgaaaattctcacattcatagaaagatagatgcaccagtaaaataaatacctgtaaatacgataataatttcataataatatgcttcacctagatttaccagttactaatattttgccagttttattttctcacacacttttgttgagcatctgaaaaccatacacatgatgacagttcaacccataatgttttagtttgcatctcccaagaataaggtttttcttctgtataacaagaatattgtaatcatacctaagaaaatgaattttattacatatgtgttctatattcaaatttctgtaattacccctaagatgtcttttaaatgatttttagcattgatagtctgtgcctgtgtagattataacattggctattgcaaaataatggttttctttttctctttttttttgagacgaaatcttgctctattgtccaagctggagggcagtggcacaatctcggctcactgcaacctccgcctcccaggttcaagcagttctcatgcttcaccctcctgagtagctgggattacaggcaggtgccactgtgctctgctaatttttatatttttagtagagacggagtttcatcgagctggccagactggtcttgaactcctgacctcaagtgatccacctgcctcgtcctcccaaagtgctggggttacaggtgtgagccactgcacccagcctaaaatgatggttttctgattctagcatttcttttataagattgctatgtaaagcacagcttttctttttttagggaaaaatgtcttttaacagctgcaaaataaatattctttcaatggaatgacaattattatttttgccatatatttattttaaaaatttatgtataatggtaacctgagcctgcatgttattcatgtgtggtgccatactgatctttaattttaatgtgaagcaagtactaatatagtaaagcataaattatataaaatttgctttatattttggattgcaaattaattgctgtactttatagaaaagtttcccaaatccgttttacttttttgtatttgaaatttaatcacaggtggaatcttaaagagagcatttagggatattgtaaacagatgttattaaggactaatgttaacaaacattgaagaagagaaaacagtatttgtttttagcttaacatcttagtggagtgaaatattttcagtatatttattttatttatttattaattatttttttttttgagatggagtctggctgtattgtccaggctggagtgcagcggtgcaatctcagctcactgcaacctctgcctcctgggttcaagcgattcttgtgtctcagcctcccgagtagttgggatttacaagtcaatttttttttaactaaaactacagaatctatttttcttggtctcatactcagttttttatgtagtcacttagtaaataacctaatttgcttgttttctccacactaattttagggtgaattcctcatttcgcttttcagatcatggggtgagggggatggttgtgtgtgtgaggaactgaggaatcagatggaaaacaatgcctctgctcctttgagtataatcagtgatatttgaggttccagggttaaatgctgcatttttatttctgacgttcgtaccttaaaatatttgaagaaaataaactatttcattgttgt

SEQ ID NO: 24 - DNA, 3518 bp, Homo sapiens
tttttttttttttttttgcgatggagtatcactctgtttcccaggctggagtacagtggagccatcttggcccactgcaacctccgcctcccaggttcaagcagttcttctgcctcagcctcccaagtagctgggattacaggtgtatgctatgacgcccggctaatttttgtatttttagtagaaacgggcttttaaccatgttgcccaggctgatctcaaactgctggcctcaagtgatccacccatctcaacctcccaaaatgctgggattacgggtgttagccaccatgcctggccttaattttttttttttttaattttgttttaggagatgggggtctcactgtgttacccaggctgggtgcagtggtgcataccctgctgcagtcttaactcctgggctgaagccatcctggctcacttcccgaatagctaggactataggcatgtgccaccacgcctggctctttaacattttttttgtttgtttttttttgtagagatggagtcttgctatgttgcccaggctggcctggtctcaaactcctggcctcaagcgatcctcctgcctcagccgcccaaagtgctgggattacaggcctgagcgaccgtactggggctgaagacttttaaagaagttatttgttgcataattctttaaaaaaattatacatgcacatggttcaaaacttaacagtaaaaagctagtctcccacccctgttccccagccacccttttccccttccctgaggccatcactatcaccatttccttgtgcgctcttccagaaatattttgggcatggacaggacactatgcatactgttctgtaccttgcttttctagttactatgtctcagagatccactgtgatttaatcagtgcccgattgaagaaaatgttctttgttttactgtgttgcaaatgggctgctaaagttatgggatgctggatcaaggagcagatcattttgagttttgatatcttcgtccatagaaattgtgcttaactatactctcatagcaatgtatgagaatgcgttcccctacacattctgatcttgttaaaccagactgggactctggaccagaagggaaagaccatccctgtatagcaaatatctggatggggagaaagctgctgtcactcattgacttctttaggttaagtcttagtgatcaaaacatagtgaaagatatgaagcttactttggaaactcagaactatttccacagtttgggcaaaagctgtcatcagatccccatcacgttttggagagaatggaagcatgaccgcattcttggctttaaagagcttaaaatcaggccgggctccatggctcacgcctgtaatcccagcactttgggaggccaaggtgggcggatcacctgaggtcaggagttcgagaccagcctggccaacatagtgaaaccccatctttactaaaaatacaaaaaaattagctgggcgtgcgggcgtgtgcctgtaataccagctacccgggaggctgaggcaggagaatcgctggaacccaggaggcagaggctgcagttgagccgagattgtgccactgcactccagcttgggcgacagagcaagaccctgtctcaaaaaaaaaaaaaaataaaatcttaaaatcgagttgggactacaagagtgacttgtgaaacagcaagatgaacaggaatccttttaaactttgatataaaagtacagtagaggttcaggggcaaggaatcagttctggatttgtctaggaatactgcatgagagcctggaaaggcagtgggatggacatgtacatgcggtttctttgggcaggaacaccctcccttctaccatggtctgtaggaattgaaccttccgtgccgttttcaaatgctgtctgtgctcggaaaatacataatatcaagtcccttactgaaccccctacagattgtgttcataaggtgcttcactgctgttggtctacctggcctactgtttgtactcctgcctcatttactgtggccttcattcaagtagtaatgattatttacctattaagagtatagggtgggcgtggtggctcatgtaatcccagcactttgggaagccaagatgggtagatcacttgaggtcaggagtttgagaccagcctgggcaacatgatgaaaccccatctctactaaaatacaaagttagctggatgtggtggcagcctcctgtaatcccaactactcggcaggctgaggcaggagaatcgcttgaacccaggaggtggaggttgcagtgagctgagatcatgctacagcaccccagcctgggcgacagaagagagacactgtctcaaaaaaaaaaaaaaaaaaagtgtaaaggagggcagaaattcttattcttttaacccattgaaacattaaacagcctttcaggagcagaccctcctacggatttgctgaatccaaggcgaggaaggcatatatccaggttacagtgaagtttgccccagacaagtaatgaagatttgggttctagatctggatactccaggcagtttttactatgtgaccctgtgcctgtcacagtatttcagcctgtaaaatatggacaatgtttgcctttttggcttccagttagctttgtgaggattaattgagatgagtgcaaagctcatttgtaatgtgtggcaggtggttttattactattttgagcagtagtggaaaagcccatttgaactggtaggatgagataagatcatggtggccttgacaactacatggaggagccagttgggtatgggaaagtttgagcagggaaagaaagaatgtagtgaaagcagtgtcaggtcaaagaaaggtttgcctaggagtgatgtaaagaatgggatggaggagtgggcagggaaggaggaaagaggagacatgtcagagggaccaaaaaggaggcagcaagtccaaggtcacaaacctgagtgactagaaaacttagcagcatcactaacacccagttggtgacgtggaactggtgctctcctgggagagagcttcaattctcaacctactaagttgaaggtgatggtgctatatctaagtggcagacagagataagggataggtgtctacaggggcaagatttggagccaggagaagaaatgagctctccaagggtagtggagagagatctgggatgttgggggctggcaggtaaatgctttaagtgatagaataggaggaatgagaaagccagcaaaagaaattcacgtcccatgtcttccatcatctatatgtctgacttgtttaagtggtcctggattcaccaaattttatagagctctgcctctgcctttattgggtaggcctgatttttgatgatgtccttaaaaggctagcctgattcttcttgtagttttgtagaacactttgtatcgagagttctctgataatgaaagtggtattacagaataatctgcccccgaaggactcctgattttgttaaagtgatacctttctctgtaaataatgatggcgtgccact

SEQ ID NO: 25 - DNA, 3138 bp, Homo sapiens
tttttttttttttttttttttttttgagacagagtctcgccctgtcgcccaggctggagtgcaatggcgtgatctcggttcactgcaacctccacctccagagttcaagcaattctcctgcttcagcctcccgagtagctgggattacaggtgcccgccaccacgcccagttaagttttgtatttttagtagagacggggtttcaccatgttggccaggctggtctcgacctcctgacctcaggtgatccgcccacctcggctttccaaagtgctgggattacaggcgtgagccaccacacctggccctaatttttgtagagatggggttttgccatgttgcccagactggtctccaactcctgggctcaagcaatccgcctgcctcagcctcccaaagtgctgggcttacaggcctgagccacagtgtctggcccacaaaaaattcactaaaaaatcagccaggagtggtggtacacatctgtagccccagctactcaggcggctgaggtgggaggactgcttgagcccaggagtttgaggctgccgtgatctatgaccatgccactgaactccagcctaagtgacagagcaagaccctatctctaaaataaacaaaaacaagtttaaaaaaagaaaataatttcaggctgagcgcggtggctcatccctataatcccggcacttcgggaggccaagacaggaagatcgcttggggccaggagttcgagaccagcctgggcaatacaagacaaaaaaattaataataataaaaaaaaattcatgaccccagcagtgcaacattaaactaacctccaggtccctccaagcagggctgccgtgagactgcccgtttcacaaatgcatgaagccagccctaagtctttagtgagtggagcctcttttgataagagcccaacacctggctagcagactccagttttggagcccaagtctgcccagatttgaaagccccagctctgcagcttctgagctgggtgactctgggcaagtcactcaacctctctgggcctcagcttccccatctgcaaaacagggataataagtatggacttcataagtcatggtgaggaccccatgagtgataaacatgatcacgacagagctgctgctgtctttgccaaggcaaaggataacggaaacgtgggtgtctcacaccaggaccccagtgtccgcccgatgtggtggcgctcaccacttcgagacaggcggcgagtgatgtcctgttttgtcccctccctatacacacatacacacataccagccactctttcccatcaggccccagcccagccctgtccccttagggtctggaggcgccaactgggagcaggcgaggccccgcagggcggccagcctccctgggccgcctccggaagtgagacagcacattcgtgtcccagggacgagaacgggaagggcggccatttggccaggctcgtttcctgtggggtttcccctgcacagagcccagggccggggccaaggccactccccatccccgcaggcacaaaaggtctgggtcttgagtggaaggggtgctgccatgcaggtgcccaggagacagggtcccctttaccaatcatggtgcacttctcaggctcttgggagatggtgtccagggggaaaccaagctcctagcagctggaggcatgagggagagggcgggccctgggctggggagcaaagcaggccccaggctgcatcaggacaccccggccagccaatgcatgtgggtatgcctgaataccccctccagacagcgtgtgcgtggaccagacacacaagggtatgtatgtgtaccgctacccccccaaccccatgctccaagaatgaatcaggggcagcttccgccgggggcgccaccaccacctccgcccccaagcctggtccccaaatactttccaccctcacagagcagctgggatcggaaaataccaagggctgcaggccccgccctgcccgccgcgccacccgccctcccagcctgtcactaacgctttgcctaatgggcccagactctcagcagaagctccgtgggctgggcctcgagccagccgccaacctgggctgcccggccaagcgccgcctgaccaggagccccccgcccctctgccccaatcccagtgcagcgacaataacaaccgccccgatgggcagccctcagagggtggcactgggtagggaaagtcagggcactgacaagtgggtgggccccgctgcccacccagggctggggtggggggaggctcaggaaggggtgagtaagtgagggctgaatcacttgttataaataggggaaccatgaaagtgacatcccagcccccattgcgtcccgccagtccacactctaacccccacttagactttaatctttcccagaccaatcacagaattcccaggggccccctcaccttcatgttgggaacccttagtagagtggtacaccccgtcatcaggtccacccctgccttctccccacataggtacattttgcagtgagggcctggctgtgggggtcccctggccttgaatgcagtcactggtgtctgcgccctatccacctccctcaacgcaccgattcccaggcccaaggctcagggcctctaggctctccaaggcattctcagggtgtgggccaccacagtcctggagggtgaccccagaacctaggccaggcgggaggccagggggcttggcatcttcgaagtcagttccccaggcaccgaggccccacatcctagaccacccagccctgctctgcccagggccacagctcagtgaccacacccagggtggcgccagctccagcaccctggggcaaggcgtcgctggagcgtgactcagccgtgcccagcatggcggcgcccttctctgcccagggattctcacccacacccactgccctccgctcaacatccttcccaggcgaccggccctaaaggacacaccttccccagacacacctccgtgtccacccaggacaccaggagggaagaaggcggccaggggcgaagtgtacacttctctccgtcccatttccaaatgcttcccatttatagatagaataattaaggctcagagattcagactggggcttaaggtcatggaataagtc

SEQ ID NO: 26 - DNA, 4125 bp, Homo sapiens
ttccctaccacctgtgctgaccccactgattctttgggcccccttactcccccaccttcattctcttcatcatacttataatacactaataactcccctgctattctgtatgtaacccaaatatcagctgtactgcctcatctcttagatatctatgtatactctgacctaatcaaaccagaaattgtggagtgtgaaatgagaaaagcaatagagaggtaacaacagtattgaacaagaagaaggaagaatttgtgaacttgaagataagttatttgaaaatacatgctcagaggagaagaaagaaaaaagaatataaaaaaataaagtcatcaggatgtacaggacagcatcaaaagagccaagttcacattacaggatttcaagaaagaaaggagaaagaaggctatagaaagcttatttaaagaaatagtagccaaaaatgtctatacctgggaaaagagataaatgtctaggtgtaggaagcttaaaggtctccaattagttttaattcaaataaaacttcagcaagacgtgttgtaataaactgtcaaaaatcaaagacaaaagcacaggggtttttgttttttgttgttttgagccgagtcttgctctgttacccagactggagtgcagtggcaccatcttggctcattgcaacctttgcctcctgggttcaagcgagtctcgtgcctcaggctcccaagtagctgggactgcaggtgtgcaccaccgcacctggccggtttttatgttttttagtagagacagggtttcaccatgttggccaggctggtcttgaactcctagcctcaagtgatctgcctgccttggcctcccaaagtgctgggattacaggcatgagccaccgcactcggcccaaagacagagttttaaaggcacaaaagaagagagactcatcatttacaatggaactctataaagctatcagcagacttctcagtaaaaactcttagaggccaggaggacagtaggttgatattattacattacagcagaaaaaaaccctggaagctaagaataatttacttagcaatctgtccttacaaatgaaggacgttgtataaggactttcccatacaaacaaaagctaagcaagtatatcacttctaggcctgtcttacgaaaacgataaagggagttttttttaatatgaaaaaaaggacattaagtagtaacgtggaaacgtgaaaggatagaactctctgataaaagtaaatgcagaatcaaatttcaggatactctaacactgtaatggaagtatgataatcacttatatattgagtataaagtctaaaaggcaaaactgttaaacataataggcatattaacttgtttagggatatacaatataaaagaagtctaacatcaaaaatataaatgtgggtggaagaataaaagtgtagtgttttctatgtgatagaagttaactttatcaggttaaaatagccatttataagtaaaatatgttatatgcaagactcatgctaatcatgaagcaaaaaacctatagtaagtattcaaagataaaaagcaagaaacctaacataccagttcataaatgcatctaataacaaagacagcaagtgagtaggaagaaaacaaagaatctagaaaacaatgaggaaataataaatgaagagtaaggttttttttgttttttttttttgatacagagtttcactctgtcacccaggctggagtgcagtggtgcaatctcagctcactgtaacctccacttccccagttcaagcaattctgcctcagcctcctgagtagctgggactgcaggtgcctgccaccacacccagctaatttttttgtattttagtagagacggtgtttcgccgtgttggccaggctggtctcgaactcctgaccttgtgatctgcctgccttggcctcccaaagtgatgagattgcaggcatgagccactgcgccccgccaggagtaagttcttaactatcaataattaccttgaatgaggccaggcgctgtggctcaagcctgtaatctgggcactttgggaggccaaggcgggtggatcacctgaggtcaggagttcgagatgagcctggccaacgtggtgagaccctgtctctactaaaaataaaaaaaattggctgggcatggtggcgggcacttgtagtcccagctacttgggagggtgaggcagcataatcgcttgaacccaggaggcggaggttgcaagagcaaaactccatcaaataaataaataccttgaatgtaaatggattaagttatttaaagacacagaatatcataataattttttaaaagacccaagtatatgctgtgagaagagactaacttaaccattaagaacacagaaagtgaagaactagaaaagatattctatgcaaatagaaaccaaaacagagtagaggttgaataaacattaaggaaaaactataatagtacaaaaattgtcattatacaatgataaagaggtgaattcatccagaggatataagaattgtaaatgtagatatgtgcaccatcagagaaccttaatatataagcaaatattaatctgaaggagagacagattgcaatacaatactagtagggagcttaaatatcttactttccatagtggacagatcattcagacagaaaatcaataaggaatcgttggatgcaaactgcactttagaccaaatgtaccctaacagacatacacagaacattccatgaaacagtagtagagtatcattcttctcaggcatatggaacattctccggacagatcatatagataagacaaagcaaatcttatcaaatttaattgaaattatatcaagtattagttcctactacaatgggacaaaattagaaatcaataacggggaatttcaagatggagggatatgggaaaattaaccacatgctcccaaacaatgggtcaaaaaagaaatcacaagagagattttaaagtatcttgagacaaacagaaatagaaacacaacatactaaatcttgtggaaagcagcaagagcagttctaagggggaagatcagagcaataaatgcctacaacaacaacaaaggtctctgaacctaacattacaccctaaggaactagaaaaagacaagcaaactaaactcaaagtcagtaaaagaaggaagtaataaagatccagtgtaatcagaaaaaaatgagagagcagaaaaacacaattgagaagatccttgaaactaagtttgcttttctgaaaagataaatcacaaacctttagccaaacaaaccaagaaaaaagaagagtcaatcagacatggaagatgagacattacacttaataccacagaaatacaaaaggtcataagacaacattatccacaactatatgcccacaagttagacaatctaaaagaagtagagaaattcctagaaagataaacctgctaagactgaatcatgaggaaatagaagtatcttcattaatgcagaattgaggaaacaaattaggccaggtgccagtggctcacccctgtaatcccaccaccttgggaggctgaggcaggcagatcacttgaggtgaggagttttgagaccaacctggccaacatggcgaaaccgtgtctttactaaaaatacaaaaattagctgggtgtggtggtgcatgcttgtaatcccagctacttgagaggctgaggcacaagaatcactttaaccggggaggtggaggttgcagtgagcctagatcacaccactgtacttcagcttgggcaacagagggagacttttatctcaaataaataaaattaagaaaaacgaaaacgaattaaaaatctgaactgaccaagaatgagaacgagattcaatcagtaataaaacacttgcatcaaagtaaagcccaggacatgatgtgttctttgcagcattctaccaaacattaagaaaagagtaatgccaatcattctcaaattccttcaaaatatttaagagtagaaaacatttccattctcttttttgaggccagcattaccctgatgccaaagctacacacaaggataatacaagaaaagctacaggtcacattccctatgaacttagatacaaaatcctcacagaatactagc

SEQ ID NO: 27 - DNA, 5049 bp, Homo sapiens
tttttttttttttttttttaaagagacagagtctcgctctgtcacccaggtgggtgcagtggcacgatctggctcactgcaacctccgcctcctgggttcgggcgattctcctgcctcagcctcctgagtagctgggattacaggtgtgcgccgccacacccagctaattttgtatttttagtagagacggggtttcaccatgttgctcaggctggtctcaaactcctgaccttgtgatccgccaaccttggcctgtcgacctctttacccattccattgttcattcttctttcttgaaatcccaaaccttctattaacattcttttcagttatacactgaactttactgtagcctttcttctagagtaacaaatgttctttgttttccttcctctaaagatgtctttatgtttccttcattcccaaagaatatttttgtggaatataagattcagagttggcagttgttttcttttagacttcagagatgtatctctctgttctgtacattattgtttaatataagaaacctactaccattcaaataatcattccctattttacaatgcatccgttctgtcaagcttcattcaaagtgtttttcattgtctctagtgttcagaagtttggctgtgatgtgcgtggcatggaagtttttgggtgtattctatttggcgctccctggtgcttgcccagctttttgatctgtaggattatgccttttgcaaaatttggggaactttcaactattatttcttcaaatattttttcaccccccagtcttgtcttttttagggacttcaataacatgagtggcagatcttgttttacactcccatgggtccttcaggctctcatcttttttctttttccagtctattttctgtcttgttaatattgattaatttttattgaccttccatggtcctcactgattgttttctttgtcatacctaatctgttgagtttgtgcagtgagttttcattttggttttgtattttccagttgtttaatttccattgggtgggttcttttgtacaccttctgtttctttgcttattttttaacgccaaagaaagactctcagagaatagacaactatattccaaagtcatggttctctggtggtttgtcttgacatttgaatagaaatgttaaactatctgggggaatagaaagcccacagtcttctgagttgtgctacaccaatatttctatgaacagatcttacaactgagagtgatctgcagatttttcagagtcatgttctccatggaatgtttgtaaaattccctagctctctgcactgagctgagatcgtgccactgcactccagcctgggcaacagagcgagactccatctcaaaaaaaaaaaaaattctctagctctctatgccttgttgtatcctcaggaaggagtcacctctcttccaggatcactcttgccttttgttattggacacattttcctacctcctgcccagtcttttttaggctctctgtcatacttcctcgcctagtctttaacttgtctctgataaccagatttttcccccataatctgtatctgtattcaagtctctatcctcatccccaaatggatttcaccccgcttgtccatcagtctctgcccatttcttctgtctcccacagacatggtctgtgtagttgttctgcacactacccgtcctcgccccttctcatttccctcactccacggacagctacaggagggcttccatcatttgtcctcttacttccttgttagaactttgtgctgctgaccaccactctgaaccaaaacttctttcttggttcttgaaagttgctgtctttctcctccagagggtctgtgtcttccttccaactcttaaacatttttgtttcccagaatccatcattggccattgctttttcacttgccatgagctctgtgaatgagatggttcctgctgaagacatttactttcaatgatctacagaatttcccaaatctatgtctccagactggatgtttctcacgtctgtggcccactgggcatcttctgcactttctctgcatttgtaaacactgagcctgtatgcgtgtctatgtggccatggccctggccgtggggatgcacccataattataatgagagcaggcgaatgtcatgtggctatgtatgagacattgttgtgaatgttttacatgcatcagctctttcaacatttacagcatctgtgtgtggtaggtaatgttgtttccttcattttgcagagcagaatatagataggctcaggttaagaatttgcccaaggttacacagttatgaagtttggatttaggaatgggaggccacgtagactggcttcagaattcatgtctttaaccactttattgcttctcatgttggggggtttgttttctggtcactatttttactaaagttgattcaacaatgctataatctgttactctcattcgacaatacatcttgactgtttcttcaacttgaggaaggtaaaccaaagccactctttaatgggtgcaaatatctgttgtaactatgtagaagatacagtgtctgggtttgaggacaggggagtgggaaaactgagtagggaagcggtaagacatgcatctggctttaggagtgtttgaagtgcctaaagatcagggtgaatttcccaaatttgaatcttgttgcccaagccacattgcaaccacctctttttctcttacctcgtccccacatccaggcactgccccattctgttcattccacctttttttttagtagaccctccatatatgtatgtgttttggtgaatggccacacacagcaaagttatttttattgcaattttgttgttgttgtttgagacacagagtctcacactctgccacccagactgaagtgcagtggtgcgatctcagttcactgcaacctccatccccccatgttcaagcaattctcctgcctcagcctcccaagtagctgggattacaggcatgggccaccatgcccggctaatttttgtattttttgtagacacggggtttcaccatgttggccaggctggtctcacactcctgacctcaggtgatccacccgcctcggcctcccgaagtgctggcattacaggcatgagccaccacacccagcctttattgcaatttttggttccctcacagaatgtttaccatgaagctgtgcgtataggtggtaccatgtatgacataccttgacctcaaagataatctacctgggctttttttgtttgtttgttttgagatggagtctcactctgtcacccatgctggtgtgcagtggcgtgatcttggctcacagcagcctctgcctcccgggttcaagcgattctcctgcctcagcctcctgagtagctgggactacaggtgcctgcgaccacacccagctaatttttgtatttttagtagtagtgggatttcaccatgttggccaggatggtctccacctcctgacttcatgatccacccgcctcggcctcccaaagtgctgggattacaggcgtgagccaccgcacctggcctacctgggcttttttggacagatgtacatgattttagaaattgttatgaatgactgtcttgggatcctcaagaacacccccaggtttgacgatttgctgagaagactcaggtctcagcattctgtcatactcaacagctatgatttactgcagcaaaaaaatacaaagcaaatagtaaagggaaaaagccaaaattcagagaaaaccaggcacaatcttctgagtcttgtttcagtgaagtcacaggatgtgccttatttaagttccatctggtacttaggacaacacatgctatatgtccactgggaagcttattagagactcagtgccagggtttttattgggcatgttttctagcacatcccacaattctggacttccagaaggttagcaggggttcagcttttcagctgaaaacgttatccccctttcagctggggggaaaaaaaaggcaccgaaaaacagggcactgagctactcctgttttgggtgggtggagcagtagtaagcctcccaaaatctaaggtcccacactccagcaagggtgaaccttgcaaactcaaaaggatagcagtctccaacctgctgttttatacagtgacttaagtggtactaaaatgctatataagtcaaatttacgtaacattaagcaaataattttttttcagcaaaaaataatggtcatgactttgtggtgaaggcttatgtaatgattgtaataaattcaggtggctcacgcctgtgataccagcacttttgggaggctgaggcgggtggatcacttgaggtcaggagtttgagaccagcctagccaacatggtgaaatcccatctctacaaaatgaaaaattagccgggcgtagtggtacatgcatttagtcctagctacttgggaggctgaggcaggaaaatcgcttgaacctgggaggcagaggttgcagtgagccgagatcatgccactgcactccagcctgggtgacagagtgagactgtgtctcaaaaaaaaaaaaaaaaaaaaatgcctcagttttgttaagaggaaaaagcaaatcctaagttacagtggaacttatgaacaccctagcctagagatttaatttagtgatgaaaaggtacagagagagtctttcaagaaaggacctagtctgctcgcgttctctctctctctctctctatatatatatgtatatgtgtgtgtacatatggaccacttcaagctacacacacacacacacacatatacacgtgtatgaatatatatatatggctataagtggtgcgacttgcaggtactccctttgttcacctttgtaaagatgttattgccagttcagtgtgtatttctatagtatatatgtaaacaatttgtcatccttttgttgctgcttttgaaactagttcatggcttcagtgggggagagatttaaataatatgggtttataatttctgcatttattaatgcagataacttgtgattaaagagtatgttatt

SEQ ID NO: 28 - DNA, 2078 bp, Homo sapiens
ctcaacaagatggccggaagaacccgcgccgacgcctgcagggccgcctgccttgggtacttgaacgtgtgaataaccggccattcgcgactccagcggcgcaggcacacgttcccccagggtaggtgtgtggagcggccggggcgtagccacggcaccagcccaggagggaaagacggagaggtacggacgtcgcccgccatctctccggaagctcctgccgggctgggaccccggcggaaagtcttgccgagaggtcgccccctgccgccgtggaggccgtcggccagagcgaccggaggcggagtttgcagcctggcaaggagaatggagcgctccggggttgggcgggcgggggagccgggagccgggcgcctagaatggaggtcccccgggaggagcccgaagcagcgtccttccgggagcacccagggaagaacctggaggtccaacctgtgggctcttaagagaagggaggcggcctatcgaaagtcctagaggcccgaggtaacagggcttcaggggccactagtacgtctttcctgctgacacctcaggcctgtaacagaaaacagaagcacccaaggaatgtcaaaaggccacaggaataagtttgaaggggctgccgttggttgaattttgtataatttgacaagtatttaaaacattcaattaaaaagaatccatgggttcatattaccacaactactacactaatattaatataaaaggagagagaagtaaagatgctttttcaaaacagtagaatgacaaccaataaatataggaattataaaattggaaatccaccattttgcagcaatcgtggtaataattgattcagccaagaatcaccagtggaagctgaaactattaggtgaaagactgggaataggttattcacacagtcttaaagtaacacctcctggattacttattaattataaaggggaaatttttcaggcaatggagacatttgctggacattgccttagccaaaagtcaaacttagcatttccagtaataggacaaactgagactgtgtgcctcctggtgtgaggaacaggaagaacacacatcatctgggtagtatttctaataggctcaacctgattaatgaagaaacaatcagacaaatcaaaattgaggaacattctgcaaagcaattgacttgagttcttaaaagatggcaatatcttttttttttttttttgagatagagtctcactctgtctcccaggctgaagtgcagtggtgcgatctcggctcactgcaacctccgcctcccaggttcaagcaattctcctgcctcagcctccgaagtatctgggattacaggcacgtgacaccatacccagctaatttttggatttttagtagagccagggtttcactatgttggccagggtggtctcaaactcctgacctcaagtgatcccgcctcagcctcccaaagtgctgggattacaggcgtgagccaccgcacccagccaaaagttggcaatattgtgaaagaacaaagtgatagggcagcagtctgcagatcaaagaagggtcaagaaactacaacttacatgcatggtgtgattctggactggatcttggtttgagtcttggtttaggaggaaaacacaattataagagacattattgcaaaagttggataaatttgaatatgaactcaatattagataatatatcagtttcctgggtgcaataattttatgtagttatgaaggagaatgactgttcttaggacatacagacaaaagtatttacaggagaagtgtcttgatgtctgcaacaaattcccaaatggttcatatatatgtgttatatatatgtttatatatatgtaaatgtaaatatatgtgtgtgtgtatgtgtattcagagagaaaagcaaatacaatatgacttttgaacaatgtcagttaagcattctgactaacccacatatacattttgactccccaaaaactttactaataggctactgttgaccagaagccttactgataatatagttattttgtatgttatatgtattatatactgtattcttacaataaagtaagc

SEQ ID NO: 29 - DNA, 4633 bp, Homo sapiens
ccagaatcctcgcgccctgcgtcgtgctggcacttttaaccggccgggccttagagcggagcctgtagccagggcgccatctttgacgctggcagtcttggttttctgctagtgctgctgctgctgggaggacgacggacggcagcggccaagcaagaagaaagacgtggcagcaagcgggagtcggggatagtgtcatcggttcggtaaagtttctgttctctgatttggggatattccctgcccaaaaaattcctggaaaattgactagtattaagtgcgtaatagattggaactcagtgaagacacagatgttcctgttcagagcaaccagctaatgattacagtttaaagacaatttctgtgatcaagttgtcatttggaagattaaacccatttcacgaggacttggagcctggtccttgctttgaggaagcagtggcttgtttcaagaagccacttctgatctaagaatctacccagcatgcctaatcaaggagaagactgctatttttttttctattccacatgtaccaaaggcgacagctgcccattccgtcactgtgaagctgcaataggaaatgaaactgtttgcacattatggcaagaagggcgctgttttcgacaggtgtgcaggtttcggcacatggagattgataaaaaacgcagtgaaattccttgttattgggaaaatcagccaacaggatgtcaaaaattaaactgcgctttccatcacaatagaggacgatatgttgatggccttttcctacctccgagcaaaactgtgttgcccactgtgcctgagtcaccagaagaggaagtgaaggctagccaactttcagttcagcagaacaaattgtctgtccagtccaatccttcccctcagctgcggagcgttatgaaagtagaaagttccgaaaatgttcctagccccacgcatccaccagttgtaattaatgctgcagatgatgatgaagatgatgatgatcagttttctgaggaaggtgatgaaaccaaaacacctaccctgcaaccaactcctgaagttcacaatggattacgagtgacttctgtccggaaacctgcagtcaatataaagcaaggtgaatgtttgaattttggaataaaaactcttgaggaaattaagtcaaagaaaatgaaggaaaaatctaagaagcaaggtgagggttcttcaggagtttccagtcttttactccaccctgagcccgttccaggtcctgaaaaagaaaatgtcaggactgtggtgaggacagtaactctctccaccaaacaaggagaagaacccttggttagattgagtcttactgagagactggggaaacgaaaattttcagcaggcggtgacagtgatcctccattaaagcgtagcctggcacagaggctagggaagaaagttgaagctccagaaactaacattgacaaaacaccaaagaaagctcaagtttccaagtctcttaaggagcgattaggcatgtcagctgatccagataatgaggatgcaacagataaagttaataaagttggtgagatccatgtgaagacattagaagaaattcttcttgaaagagccagtcagaaacgtggagaattgcaaactaaactcaagacagaaggaccttcaaaaactgatgattctacttcaggagcaagaagctcctccactatccgtatcaaaaccttctctgaggtcctggctgaaaaaaaaacatcggcagcaggaagcagagagacaaaaaagcaaaaaggatacaacttgcatcaagctaaagattgatagtgaaattaaaaaaacagtagttttgccacccattgttgccagcagaggacaatcagaggagcctgcaggtaaaacaaagtctatgcaggaggtgcacatcaagacgctggaagaaattaaactggagaaggcactgagggtgcagcagagctctgagagcagcaccagctccccgtctcaacacgaggccactccaggggcaaggcggctgctgcgaatcaccaaaagaacagggatgaaagaagagaagaaccttcaggaaggaaatgaagttgattctcagagcagtattagaacagaagctaaagaggcttcaggtgagaccacaggagttgacatcactaaaattcaagtcaagagatgtgagaccatgagagagaagcacatgcagaaacagcaggagagggaaaaatcagtcttgacacctcttcggggagatgtagcctcttgcaatacccaagtggcagagaaaccagtgctcactgctgtgccaggaatcacacggcacctgaccaagcggcttcccacaaagtcatcccagaaggtggaggtagaaacctcagggattggagactcattattgaatgtgaaatgtgcagcacagaccttggaaaaaaggggtaaagctaaacccaaagtgaacgtgaagccatctgtggttaaagttgtgtcatcccccaaattggccccaaaacgtaaggcagtggagatgcacgctgctgtcattgccgctgtgaagccactcagctccagcagtgtcctacaggaacccccagccaaaaaggcagctgtggctgttgtcccgcttgtctctgaggacaaatcagtcactgtgcctgaagcagaaaatcctagagacagtcttgtgctgcctccaacccagtcctcttcagattcctcacccccggaggtgtctggcccttcctcatcccaaatgagcatgaaaactcgccgactcagctctgcctcaacaggaaagcccccactctctgtggaggatgattttgagaaactaatatgggagatttcaggaggcaaattggaagctgagattgacctggatcctgggaaagatgaagatgaccttctgcttgagctatcagaaatgattgatagctgaaggtggtagtgaggacactttaaaaaaaaaaatcgccaaaaaactggacttagtttcatctattgtaacatttacctgagatgatcatttctttagtctagaatttgccccaaatcagaagtatacctctgaattatctgtatgtgtcctggattccttggggtcagatttttaaagttactttataaccattttgtccatttgatgccattgtttatcatcttttgagaaaaaagttctgtcatacccttctctccacaaaaaagagactgagagggagatcaagtgaaagggtgcaagcgaacttagtgactccttgaggtgtttgtcagttttggcttttttcttctttgttgtattctttatgtattgtcttgatgtacttaatattacctgagtttgaaatggatgaagacagctgctaccattaaggaccaaattttatgctaccactaaacaaaaatacccactcagtctgtgttaaattgtatgtctttttaaaggtatttaaagattcaactaagctttaaagagggctgagcagctcaggaagcctgtaatgtgggcataactctttggacctgatcttgatgcttctgctgctctgttagcctctgaagagcaatatctaatttattattactgtaattttttaaaaggctttaaagtgcctcaggggtcccctgaaactaattttctatttctgggattccctggattcattatatgagatggtgacatgattagaggaattcttttttagtatgaaaattgtcccttttcttcttcagtacttgcctccttgctggcattgaattaacacagggacaaaatttggttaattttttatttctaactctcccaacaaacccctgttgcccagtatttgtttggtggcctttaaccacctgagggaaaaaatgagcttattcaagctgccaatatttatctatgggctgtagcagtacactgaattgtactgtgccagggatattgagatgctctgggggtgtattgtatacctgccagttttcttcatttctgaattgagttttcttttcttgatgttggtttccttcatatcacctcaaggtttagatttgtgaaggaataagcatgatggaaataatagtcttgaaaggagatatgttgtatataatcaggaggaagaggaaggaaggacttacccattttgatattttgctgtaggtggccagttttgtttctcatagggaaatctgacccacctgtcatgttggctcctaaggaactgctgttgtaagcggctcatcaagagttgaacttcacgtagccttgttgggaatatggaaaaggaagaaagccacaggactgcccattcagtcttgggaagattgggatgattctgcacaagcaaaaatgactgaagtttatgtatagacacacctctaccaatccatcttcagctgactgaatgttgtatgatagcccttctccaaagcagaggtagaatgttcaggtttcaccatggattttctacttatttcgtttttggaatcaccttacagattccaggtcccttttgtatatattctttattcttttgcttttttaaaaaataattttgtttcatatttaaagcacttgtattagtcaatgtttcgtgttccgcattatttgaaccatttgcccttacagaaagagaaatacttgttgtgttttaaataaactgatgt

SEQ ID NO: 30 - DNA, 4760 bp, Homo sapiens
tttttttttttttttttttttttgtgatagagtctcgctctctcacccaggctggagtgcagtggcatgagctcagctcgctgcagcctcgacctcccaggctcaagcgattctcgtgcctcagtctcccaagtagctgggattacaggcaccctaccaccatgccaggccaacttttgcatttttagtagagacagggcttcaccatgccggccaggctggtctccaattcccgacctcaggtgatccgcccgcctcagcctcccaaagtgctgagattacaggtgtgagccaccatggccgcctggtctttttttttttaatactcaagttgtctcatcttcggccagtgggagcctcttgcaattaacttctaagtcctaccgatattacctcaggattttttttttttttttaagagatggggtcttggtatgttgcttaggctggtttcaaactccttggctcaagtgatcctcctaccgcggcctcatgagtagctaggactacggatacatgctactgcacctgctggttttttgtgttttttgtttttgtttttttgattttttgtatagacaggggtcttgcttttaggttgcagtttccacagttacttttgcaccaacctaatatattgctcaggttggtttcaaactcctgagctcaagcagtcctcctgccttggcctcccaaagcacagggattagacatgagccactgtgtttggccctcaggaatctttgatagcttcctagctttccagtatgacaagatgctccaaactcttccttttatttcttgccaagaccagatattagtcatttctccacggagccctaattctgtattaattactaaattatttaatttttaaatttccttttgccctgagttatttagaaggggatttgaaaactttcttttcggcaagccttgcatttaaaaatgtacattttagtgcactatggtaaaaatacacctacaatcactcctgttgagatattctgacacttttggtcaatgattcttatttaaaagggaaagatcgttttatagtcctaaacttgtgccttttcaaaccaaagaaagctattctagtctatatttttctccctatgtcccatcttttatctcctatttagatactggaattttgggacatatccctgtatcattgagctttccttgatactttctctgttagtactttttggttgaatgagagacaccttgtgattattctgacagctttactcttcagctgtatccctctatttagcttttaaaacaactttaacaaccataattgcaatatctaagattggattggttcttttataataacctatacttattttatggctatgataccatactctatactcttgggatgttaaatacacttatttgatgtcttctttaatatgctgttattttgactttttaaaacggtttgttcagggcctttcgtgttactgactttcttcaaatattttagtgattcacagttataattttaagttatttagttgctcatttttgtatttgagagcctctttttatggatgccgtatctgttatcatagcctgtgatgagagtagtgggctgtgctatgttgaggatatgccagtattttggctctgggtacagtagtcctccttatctgcagggagtatattccaagacccccagtggatacctgaaaccatgaatagtaccaaacccagtggctgtcagttggaacacgtttccattcacgtctgccatccacaagtttaatgctctttacaccttaactaagtgcctacctgcactctggggtaacttccgaagtttaaggtgcacagcaaaactaacacgaatttatctttccttcttcacaatttcacggatggaagatttgttcataccttagatctaagccatattttagatcttagcaacctcagcatacaattaaaataattattgtcaagaacttttacattttcacttaaaggaagcaatttacagttttttggcacatcggaattgccagaatcactactggcattttgaggtcattattaagttaaataggagttgcttgaatgcaaacactgagatactgtgacagttgatctgattaacgaggacagctactgattgactaacaggcaggcagcgtagacagtgtggatacactggacaaagggatgattcacatcctgggaaggacagagcagatggtacaagatttcatcccagtactcagaatctacctgcaatgtaaaactcatgaattatttctggaactttccatgtaatatattaagactgtgttgaccatgggtaacaaactgtggaaagcaaaaccatggataagggggaactagggtatgggcttctgttctcctcttgcgggtcagcaagtgtctgggggcactgccctgctttcccagcttcggtggcatcactcagttgttataggctggccagagacactgcttttgtccaccactcagcttgtggttggggaagggaacttgcgtagctattctgaatcaatcagctccctaatgagtcaccctgtccagtaccccagggaaccctcctgctttttgcatctgttgactctgggttccaacccatgcctccttttatagtagtcttgcctgttttgaattatgattccctatcattttgtttgcctataactgatcctacctgcttttgatgtttctggcattcttccaaatttctattccattgctagccctctcatctttcagtgctatagcagatttcttatttttcttctgttttattaattacagcactttatggaatttagagttgagagggagagcagatacttctgtttgccatcttgatccaatctcactaacaaacagcacttaaagcaaacagaacaaaaactctttgtctttctcttgttgagactcctgggatgatcctatagttacaaaatgtgctgtgcaactagtaactcacagaacatatttacaaggttttattaaaatatcagcccttttcccttcttcctaacacacaacattttgtgatgaatctgttaatactaaacaccagttcctagcagtgaatactctaggagtcatgaaatagtattcagtgataattatatttgcattgaaaaaataacatattagggacaacagaattatcttttaaaaagtgacccagttgactttaggagaaaagacaggcccagcactgccctcgggtgcctcattttagaggccctcctgtagttgtgttctttcccagggggcaaaaagtctgctgggccagtgggttatgcctacctggaactcacttcattctcttctcgaccacgttcaaggtacctgaaaccctgattttcctgcctaaactgctcagcttccagggctttcacaaggcctatctatcttttgcccaaacctaccctggttgaaaaggtgtccaaggggcagctatttgcaaggctgtggaaaaacttacttacttaggcatgtaggctgaagaatacacaagtgttcctgtgaagcccttcagaatactgaaggagcgggtggaagagaaggaaggcaatgtgctgcaggctggttctcccctggctgccatctttgggcatggaattctgagaagtgtgaaaattcaaggtggacttgcatgttgtgcataaaatttagtagcttttaagcttgatttataacaccgaaatatcttgacctatctattgcttcagggcctgcaaattttaggggaggtcctaggaaggagaaagagtgattcctaagtgggtccaggcagcatacctgcaaacggtgatgtcataaagtagtcctgctgagttttaggtaagccacttatagctactaccatttttttcagccagtggaaacatattccatatctaaccagtttcttccagtagtttgagctaacgagaagaggagtaaaaagttctagaatcaattgctggcaagatggccgaatagaaacagctgcggtctacagctcccagagagatggatgcagaaggtgggtgatttctgcatttccaactgaggtacctggttcatctcactgggactggttggacagtgggtgcagcccacaagggcgagccgaagcagggtggggcgttgcttacccaggaagcacaaggggtcagggaactccctctcctagccaaggaaagccattagggactgtactgtgaggaacagtgcactccggcccaggtactgcacttttcccacggtcttcacaacctgcagaccaggagattccttccggtgcctacaccaccagggccctgggtttcaagcacaaaactgggcggctgtttgggcagacaccaagctagctgcaagagttttttttcataccccagtggttcctggaatgccagtaagacagaaccattcactcccctggaaagggggctgaagccagggagccaagtggtctggctcggtggatcccatccccacagtgcccagcaacctaagattcaccagcttgaaattcttgctgccagcacagcagtctgaactcagcctgggatgctcgagcttggtgggggaagaggtgtctgccattcctgaggcttgagtaggcagttttaccctcaaagtgtaaacaaagccacctggaagatcgaactgggcagagcatactgcagctcagcaaggccgctgtggccagactgcctctctatattcctcctctctgggcagggcatctc

SEQ ID NO: 31 - DNA, 3830 bp, Homo sapiens
tttttttttttttttttttttttctaggctgagcacagttgttatcccacaatgagaatcccattaatgacagcaaagaggagagggaggtcagcagtagggagtttctgacacagcaaagtggatacacatgaatcctgaaaggtgacctcgcaaagtggaagccagggccctgaacaccagcaagacaggccagtggggataggagctcatctgccccctggaacactggaatggagaggctccaatggggaaccctagcagcctacctcaagaactgttgtggcccacaagagccagggctgtaaaaagaaatccaggggcagagtggaaggcacgccatgtaatacccaggatgaaaaagaaagctaataaaagtccagaaaaaccaccatgagaaagtcaggatccaaacagaacacaagctaaaatggggagtacctttgagcaactgatgaaatatgaggagcaaactccattccatttgaccttaaccttacgaacattcattctctcttgagggatgcagaagtcaagacatgaggagagggaatgtaatctttgcacactgcttgacacagcattaagccagttcacactgtcataacaagtgtttatcagcttcaccttttaaaagggaactacagataatgcacagaaaacaactggaaatatctccttcaacaatgtgaaagtgaaagcagaacccagcaattagcaagcctgagaggcagagggtagggacacatcttcgttgtcaacgctgaggattcaagagacattgacaaagatgattaaatatttttaaaaaacaaaatgctattacagatgctcctcaacttacgatggggtcacatcctgataaactcaccataaactgaaaatatcataagttaaaatgcattttaatacacttaaccgacccaccatcctagctcagtctagcctacttcaaacatgctcaggacgcttacattcacctacagctgggcaaaatcacctaacacaaaaccaatttaataatgaagagttgaggccatgtgtggtagctcaagccagtaatcccagcactttgtgagacccaggtaggcagttcacttgaggccaggagttcgagaccagcctggccaacatggtgaaaccccgtctctactaaaaaatacaaaaaattagctcggcatggtggtgtgcacctgtagtcccagctacttgggaggctgagacaggagaattgcttgaacctgggagatggaggttgcagtgagctgagatcgtgccaatgcactacagcctgggtaggagagttagactccgtctcaaataaataaataaataaataaataaataaataaagtaaattggaaagcagctatgctcaccactataccaacgtggccaacatggtgaaactgtctctactaaaaatacaaaaattagccaagcatggtggaaggtgcctgtaatcccagctactcaggaggctgaggcaggagaattgcttgaaaccaggaggcagaggttgcagtgagctgagattgcaccactgtactccagcctgggcggcagagcaagactccctctcaacaacaacaaagttaaatttaaaaaaatgaattctaccacatgtatgtaatagtttgattaaatgccaatctgattatgcctcagaagtaaggaaaagtaccatttttacttatcaaaatggcaaccaaataatgcccagtgtaggtaaaggtgtgttaaagaaactgacatgaactttgcacaagaaaattggctctaattccaccttcaggaactaaaaattgatgcataaagatgttcatctcaagagttgtctacaaaatcagaaaacctccaagacatccagcaatgactacaattacataatctggtaatgatatatcctaatgataaatcacatatatccactgaatgtttaccaagtaaatatggtttaaaaaaattacaaaactatatacagaatgatctcaaatgaaccaaaatgcttaatgtaggtaggaatatgattatttttaatttttaaatattttttctttattttccaagtttcccacaaagaaaatacatttaaaataaaaagtcggtggccagatgtggtggctcacacctgtactcccagcactttgggaggccgaggcaggtggatcacttgaggtcaggagtttgagaccagcctgacaaaacatggtgaaaccctgtctctactaaaaatacaaaagttagctgggcgtggtggcgcgtgcctgtaattccagctactcgggaggctgaggctggggaatcacttgaaaccaggaggtggaggttgcagtgagccgagatcacgcctctgcacttcagcctgggctgagcaagactccatctcaaaaaaataatacataaaaataatttaaaaactcaattatttaaaaatcagcttgttaaaagacatgattgaataccatggagaatgaatgcacctagcaggaagctctgatgagaaacctggcaatacttcccttctgtaaaacaccctggggtacaggtggggccgcccatgccaggactcttctccacaaagccttcccgccttccaggtatgcagcacattggtaagtgtgctcagtaacaaacgcttcctcccacccaagccctctgctcccccagcagcttttcctgatgtgtgcttactctgcacaggttctctgcttgagtactctacatgcatcatctcattttattcttacaaccaccttgaaggtaaataatatgctcattttcagaagagaaaaaaaaggcatagaggtcaactcatttgctcaaggtcatagtcagtagcagtgctgtaactcaaaccctgatcttcatacccacagtgtgcatcaccactgagctacagtcagtaaggcttgtgaagaaaaaagaaaaaaccactccagcagtttctgtccaccatgtcctaaaatctttaaagccagatataaaaactgtcttggacgattgaataagcacttcaatagaaggcatttaaaaaaattatttgataattaatgaactgtgctaaagtaagtaaatgtactagtcttgctgttcagtaactattttaaaaggcacaccatctactactcagccttttgaactgaagaaggaaaacgtttcgaactcgatctgagtttaagatgttgaatcaagcagcctccagaacggtatctgactgactgttcacaagcagcttcaggaagagcaaagccaaataaatacttaaggagctcatgtgagtgaaaaacatacagaaaccatcactagcaattcctgttgtcccagactttccaaataaattgtggcttaaaatggcttcagtaatatttcagtatctttctaccaacgaccacttaagccaaagtaataacgtaaaatgtagtattcccattactgtgtcaaaaccaacaacaacaacaacaacaacacaacaacaaaagcccttaaatgactagatggtacaaatagacttaagagaacttgaaatttctcatgcaacattacagaaacaagtggctgggcacagtggctcaagcctctaatcccagcactttggtaagccgaggcaggcggatcacaaggtcaggagtttgaaaccagcctggccaacatggtgaaaccctgtctctactaaaaatacaaaaatagccaggcatggtgatgcatgcctgtatcccagctactcaggaggctgaggcaggagaatcgcttgaacctgggaggcggaggttgcagtcagctgagattgtgccactgcactccagcctgggcaagagtgagactccgtc

SEQ ID NO: 32 - DNA, 7178 bp, Homo sapiens
ttttttttttttttttttctttttgaggcggaattttgctctgttcccaggctggaatgtagtatcatgatctcagctccctgcaacctccgcctcccaggttcaagcaattctcctgcctcagcctcccaagtagctgggattacaggtgcctgccaccatgcttggctaatttttgtatttttagtagagacaagatttcaccatgttggccaggctggtcttgatctcctgacctcaggtgatccacctgcctcggcctcccaaagttctgggattataggcatgagccaccgtgcccggccaaatctttctttgaaatgctaggtcctaaggttattatctccaaattacagatgagaaattgaggctacaagactttgaggaaatgactcaatgtctcagaggcagaagtgaaggatctgggtgagccaccaagggtcgtcttcttaggagatattattgccttcaagatttcaagattgattgttccgggctctgagattctagaattctctcctgccattcctcctcacccctcctgcccttgttttttgttcttcctttttttttttaagatggagtcttgctctgtcacccaggctggagtgcagtggcttgctctcttggctcactgcaacctccacctcctggttcaagcaattctcctgccccaggctcccgagtagctgggactacaggcgcgcgccactgtagctggctaatttttgtatttttagtagagatggggtttcaccatgttggctaggctggtgtcaaactcctggcctcaggtgatccgcccacctcagcctcaaaaagtgcaggcctgtgccaccgtgcccagccattttttgttcttccttagagaaccagctcagcctagtgcttctcagccagtaggcctcattctagagcaagacttctgggctccatgctcaatagctgtggaatatattaccctctccaaatctcagtttccgtgtctgtaaaatgggtcgggcttttctggtgttaacaccgaaagtcttgcatcccaggagccccttcagccctaggcacacccgttggtcaccctaaaaatggggggaataaaagcccatctggaagagttgtggtcaggttgggctgaacagcgttcactggtattgagcatggtacctttcaggggcctgcagagaatgggagagaaaattactgctccttacacagggtgacggagtccatggcctgagtgtgacacctaatgccaccacttccagctgtgtgccctgagttcagtttatcttcctgggtctctgttcccccagatgttaagaggattgataatagtgtgggctgagtatagtgagagtataggaagatacagtgaaataacaagagctttgccaggaagtgggcacctggtgcccgctgggcaggagtgcctgtagttaatcattatgtgtctcaaaaggtgtcaaaagcttctgaacacttaatgctgtgttttgggcctggagccccaaaaccagccagtggggacttttttttttttttttgagatggagtctcgctctgtcgcccaggctagagtgtgcagtggtgcgacctcagctcactgcaacctccgcctgccagtttcaagcaattcttctgcctcagcctcccgagtagctgggactacaggcgcgtgccaccatgcctggctaattttgttttgttttgtatttttagtagagatggggtttcaccatgctagccagtctggtctggaactcctgacctcctgatccacctgcctcggcctcccaaagtcctgggattacaggcgtgagccactgtacccagcctttttttttttttttcagtcgtatttccatgcaggacacagaaggaccagtggggactgttaccttgtctctagctttggtctttttaaaaaaaataaccctgaataatcaggagaattttttgatgaatgagggcactcctctccagctgtcccaggggtgcgaggagaacagtgtccatgagggggcgccagagcaccaggcccggggctgcagcctcccgcacccacccggcctggcctgcagggccagctctccaggcgctcccagggacttcccggcctcctaccctgggaatctggaaactccctggctcagactcagcagcccagacgctgcctggaggatcctctggttctgggcattcaccactggctttgtttggacaaaggctctgctgcgtgacagatcctgggggatgcctgagttatcgttatcatgctccagcggaagtgggtatcctcgtcctgggttacacaccaggaaactgaggcacagaaatgcacggagccggggtccaaacccacggatgcccaacccccgaatctttgccagcagtctctgagaatcagtctggatctcagaatgattgtaataatcttggaggcttagaaggctagactcatagaaatattcagttcaaatatacacgtgtattattttttgtatgggtagcgcatgggtgaaaagacaaaagtaaaaccagtcccccttctctctgaccgtccccagccaccctggaggtgaccacagtgatagtttctcgggtcttgtctcctcctgatataggactcatcaaatcttagaattagatgggatttctgggtgactcggtctctggaacccatcagcttctagcacgcagccctaaggttcccactgccatccctgtcaaactcaaactcatgggtgagtttgaggatcttggctcctggaaccccccagcttcaggcccagctactcctttagagttgaaggggctgttttctccagcgacccagacttcagttccctctgtgcctctcctcctccagggggccctccttccagaaacaccctgcctgcttctggtggtataatagaggacactcagcatggcaccctctcacttatgcctggtgatgggcctgatctgtcgggtcagtgcctttccccagaaggaacgtggtggcatttgttgattcatccgtttgtgtcatggagataatgaccgtacctacaataaagggcgaggtgagcattaaatgcatgaatgtatgcagagctcttagactagtgcctgttacattctctatggtttctattattattgatacttttagttcattcagctaaatttaccaagcattcacaggtttccgggacactgggaatacagagaacaaagcatgtttcttcctgcttgggggagaaagatccagaaagaacgtcagcgccagcatgaagagccttgtgagaaagaacaagtgctctgtgatatttcaagagatgggactccatggaggcctggtgtgtgggtaccggggtggccttgtgctttgagatgaagccagggggtctagcggggagtacaggtggcaggcaggcatcagttacataagcgcctcaccctgggagctcaagtactgtgtgacggttctgttcacggcccccacacagaacgtgctccttgtcagtagagcagagcagggaggagaagcaccagagagctgctgcgtggagtctggaagtatctcctccaacttccttggggaggaaagcaagggcccagactcttaacaccagcccatgtagtcaggtgaataattcccagtcactatctagtccctggccctggccatctgctcagccccttcggcaactccagcctggtccagcctcatctggctctgtgtgtgtgtgtgcgggggggtggtgggtgagaggctggaggagagtggagggggttggggattggggccaggcagcgctgtgtgaggctagagatgggaggtcctagagggagaccaggaaatcaggcactcaggagagctgggagggtaaaagttgctgggggcaggtgtctcgggggcagatggtggagcccaggtgaaccccctaggttgtctctgtcccatcatccttgatcctctttgtttttgagacagggtctcacaatgttgctcaggctggagtgcagtggtgcagtcatggcccattgcaccctcaaccttgtgggctcaagggatcctctcacctcagctcctggagtagctgggactacaggcatgcaccaccatgtctggcttatttcttaattttcttgtagagacagggtcttgctatattgcccaggctagcctcaagcttgagggctcaaagtgatcttcctgcctccacctcctaagtgttgagactataggtatgagccactgggcctggccccttgattccctttgcatgatagaacttcaacccttggagccccagaggatccaggcagtatcaagtcaccatccatgttatagatgagaccatgtataacatcaccatctttaacaccaccatccagccttcagatgagatcacagccctgactgcaacctctctgaccacagctcagagagggcatgtggcatgctcacaaacagtctgttaggggcttcctctgggtcagaactcagacccctcggctcttagtccaatgctcctctcctaacccaggttgcctttggggaccttggggggtctctcatttcattgggaatgcctaatggcattggttgccacgtgttgccattgttggtgtatgtaagtcgctcttctgtcctcatatccccactctgtcgtcctgccccttcttgggggtggatcctgcaggagagggggaagcagccaagcaaggcttcatttctacttttccatctgcaggacccagggctgggcacatttggtgcaacaggctggaaatattctcccctaccccaccctccccatccctcctcagaggcactgggctggggactggagcctgtggtgaggtccttcccctcaagccctgtcgggggcagccactaaatggccccaagatcccatggactcaagggattccatgtggcatcccttcccgtgctgcagaggctgggaaacttaaccacatttccagactctcttgcagctagtgtttctgatggcatggaaatcctgccattgaatgcaaacgcacaagactagaatttggaactgagtttcgtggggagagaggcagggcatggagcatccaagcatccattttgctgtgtggatggtggtagagtgcaggcctaatgctggagctggcagttgtaatggtggcttctgaattccacagcttcttgatggaggcaggagccctggcatcttagcccagttcagcagcgttttaggcagctttcctggatgctcagacacttagtaataatatgcttgaaaaaaaaagccctttttttccctactagctggaatggattccgttgtctgtcactgaaccctgatgatacatcttctacacactgtgtgggacaaggccccatggaagtcccaagtcagtaacctgaactccccaccctctctgccaagaaagagcttttttctctcagtatccatttatcggtcccaggggagctctctgattggctgtgcttgggccagtcattatctcctggaccaatcacagtggccagagagatgagatgccaagatcaattggtcaggtccagatcatttcctgcttttgtgaccaggcgggaaagggcctatctccagaagtgggatgagaaagcttgggcattcctaccacagcctgtctgacaacacctttaccccacaaggaggaactattagtgaatgccacacgggacactgctgtaatgaaacactgaggacaggagattatgacaagagtcccacagttcctgctcatgggtgatcatgcctgttcaccactaatagcctgggaaggacgcacaactgtccccatatttaccccgacaatgctttgggtgggaggggaaactgaggcacagaggaatgaggaggcagggcgcggtggctcacgcctgtaatcccagcactttggaaggtcgaggtgggtggatcacttgaggtcaggagttcaagaccagcctggccaacgtggcaaaaccccatctctactaaaatacaaaaattagctgggtatggtggcaggtgcctgtagtcccagttactcaggaggctgaggcaggagaattgcttgagcccgggaggtggaggttgcagtgagctgggatagcaccactacactccagcctgggcgacagagcaagactccatctcaaacaaacaaaaaggaatgaggaggaggctgggaggcagggagagagatgggagtttgaatacaggcctcccaatttgctgtgcattggtggacctggaggcagacagacctgagctgtgtgtgaccctggtgaggacctctgtctcagaaccccaggggtccagtgtgcagagtgacaatgaccctggctgtctctcagggccgcggtggggcctcgatggggacttggtgggacagcatgtgcatgtgtgaagacaccagaggctcctcctggtgctggtgggacttgattcctcagggaggggaggaagaaggtggtggccaccgggcctttcagtgaggaggcttctgcagaacaactcccccgttgctatggtgaccagactctcggggagtctggcttatttttgaacttggtctacacagcagcagctttgttcccgggtcttcctgctgcagcctttgtcctgtgggcttgtcgcctgaagccttggcacagtgggtctgagtgggacacaaccctggccaggaggggcaggcagagggagggggagacccagtaggcaccccctgccagcctccctaacttggccttggaggcggaggcctgggttctagtcctgcatctgctgcaggcctgctgggcaacctctcgggcatgtctgcttgagagggaaaaggagagggtatttttgctgtgcttcccccagttgaatgaaaatggaaggaaatggccgggcgcggtggctcacgcctgtaatcccagcactttgggaggccgaggcgggcggatcacctgaggtcgggagttcaagaccagcctgatcaacatggagaaaccccatctctactaacaatacaaaaattagctgggcatggtggtgcatgcctgtaatcccagctactcgggaggctgaggcaggagaatcgcttgaacctgggaagcagaggttgtgaactgagatcgcaccactgcactccagcctgggcaacaagagcaaaactcagtc

SEQ ID NO: 33 - DNA, 4522 bp, Homo sapiens
attacaagcatgaaccaccgcacctggccaggcagaagaaatttctaagcagcaaagaattcaagaggtgacttaaatgttaaaaggattcagttttatgtattcacaggatatggtttggaattggaacttaagtttaaaagggaagcagagcattaaaagtttggaaaatttgcagcctgacaaagcggtaggaaagaaaaacccattttcttaggagaaatttaagctggctacagaaatttaaaataactaatgtagagccaaatattactctccaagacaatgggaaaaatgtctccagggcatataagagacctttgtggaagcccctcccttcacaggcccagaggcctagaaggcaaaaacggtttcctgggctaggccaagggccccccctgttgtatgcagcctggggacttggtactcggcatcccagccactctagccatggctaaaagggaccaaggtacagcttgggccatggattcagatggtgcaagcaccaagccttggcagctcccacgtggtattgagtctgcaagtgcacagcagtcaaaaattgaggtttggaaacctccgcctagatttcagaggatgtatggaaacacctggatgtccacccagaagtttgctgcaggaatgaagccctcatgaagaacctctgctagggcagtgtggaagggaacgtgtgattgaagctctcacacagattccccactggggcactgcctagtggagctgtgaaaagagcaccgctatcctccagaccctggaatggtaggtccactgacagcttgcgcctgtgtgccaggaaaagccacagacactcaatgtcagcctgtgaaagcagccgggagggaggctgtaccctgcaaatccacaggagcagagctgcccaagaccatgggaacccacctcttgcatcagcatgacctggatgtgagacagggagtcaaaggagatcatttcagagctttaagatttgactgccctgctggattttggactttcacggggcctgtagtccctttgttttggccaatttctcccattttgaatgggtgtatttacccagtgcctttacccctactgtatctaggaagtaactaacttgctttttattttatgggctcacaggcggaagggacttgccttgtctcagatgagactttggactgtggacttttgagttaatgctgaaatgagttaagattcaggggaactgttgagaaggcatgattggtttttaaatgtgaggacatgagattgggaggggccagggtggaataatatggtttggctgtgtccccacccacatgtcaaattgtagcttctatatttcccacgtgttgtgggagggacccagagggaggtaattgaatcatgggggcacatctttctcattctgttctcatggtagtaaataagtgtcaagagatctgatggttttataaaggggagttcccctgcacatgctttctctcttgcctgctgccatgcagacatggcttttgccttctgccatgattgtgaggcctccccggccacgtggaactgtgagtcttttaaacttctctttctttataaattacccagtctcaggtatgtctttatcagcagtgtgagaacagactaattcatggaggatgagaggtaaatgtaggttgcaacattaagcagagtagtgggaatttgagcaaagatttgaaggagttggagttaattaaccaagtggttatctcaggtaagatacaggggaacagctagaacaatagttctaagttaagcatgtatctgaatcctctggtgggggcagggtttaaaacacattgatgagtttcattcccaaagtttctgattcagtatcaaggatggggacaagaatttacatttcttaaagttcctaagtgatgctgttgctattgatccagaaactacactttgaaaattgctgaggtagaggaaaagcccaaagtgggaatgtacatgagaaatacaaatgtttccctgagcgagggccacacagggaatagctggagctattctaaaataattttactcaagagggctcccttcagagcctgtgggctgagaaccaaaaaattgtgtgtactaagggcagaatttctgtgatcaattggaaaagataagagctctgccttgaaattctcactttctctcaactaatgaaattcacccttgttttcaagacacggattccttcccttataatctaaacttatttccctattggtgtctttatttacatttgactttagctacttttctgttataatatcttcagctccctagttaccatgtgcttccccacagcaagatatataatccaacaatgtttcttttccactcttatatggctactgagcatttccaaagaaaaatttcacagtagtatagattgatgcctattcaactttaaatgatacacagaatttgtttatctgcctttgttcaccttccttcctatagcaactctgccaaatgttcctcttaccttcatgatccctgcctcctccccttccacagatgacactaccttccatccaaagagaaaatagaaattatgacacatgaagtttctgccattttctaccaacaccttaacacatacatgctcacatattcaccagctgtaaatttacttccttcacttaccttcttctttctggcctcaaataagataaggcaagatacttggaaaagtatgtgacatcaactgaagtattcaataaatttgattggttcgtttcagtcttttattttttttaataggtaacaatggccgggcatggtgactcacacctgtaatcctagcactttgagaggccgaggcaggaggatcacttgagcccaggagcttgagattagcctgggcaacatgataaaaccccgtttctacaaaaattagccaggtgtgctggggagtgcctgtaatctcagctactagggagtctgaggtgggaggatcaccagagcccaggaagttgactctgacatgtgctgtgatcatgccactgcactacagcctgggtgacagaatgagaccctatctcaaaaataaaataaaataaaatattaaaaagtaagtaacaaatgcataatgggtgcaaaattttagagtctctccaaactgtttccttagacacacattccttggagataatcacagttaaccacctcttgtgtatctttctagaaatattccatatacaaataagcaagtacatttataaattgtttttacataaatagtaacctgccatgtacacttttcagcactcattttcactttaaaatatgttttggaaattctttcatatcaaaatataaagagctgctttgttcattttatgtatatacaataatttatttgcctacttctactgatatacatattcatttctaccacatgcaaatatacttataggggaagttcttagaaatagaatgactggataaaaatgattgccatattgtctccatgggcttaccaatctatgtcagcagtgtgttattgtgcatgcttttcctcaccctcaattaacacacagtgtttttcattcgttcattcatttattaaataatgtttgagtgactagcaggaaccaaattttgttctaggcccagggattaaagtctgtgcccttctagatcttacattctaatgagggaagacatataataaattataaatggtggttaaatttgtaattcaaatttttactttgccagatttagtcccattaccatatacatatatcaaagtatgtttgtgttttacaataatcaattttctcaacttaaagtttccatctattgcttgccttttctaaaatttctaaatttgaagtgttttattagtaaccaaatcttttaaatgagtacttcacatacattttcccaatttcttcatcttttattcatccttgaatatattgtcttcaccaatctctggtgactacagatgcacaaggttgtgattaatcatctatgtattttaaattacatttcaatccagatctgccttctagacaactagacaactccatgtgggctatctcatgataccttagtctcaatgtgtttgaaactacttattactttcccctgaccctatattcttttcaatcccttctaaacctccttttcttgtgttcccaatcatgtaaatgacattatcatccactagttgcccatcgagtaacagaggaatcaaacctccttcttcctcaagtctcacctcctcccctccaaaaataagctatagaatcatgtcatacgctaaagaagcttaaacctgttttctttctctccatcaccttgtttcatttttttggctagagtctcattgtctcacatctcagctgcttaataataatacctggcctggagcagtgactcacacctgtaatcccagcactttgggaggccgaggcaggtggatcacctgaggttaggagttcaagaccaacctggccaactccatctctactaaaat

SEQ ID NO: 34 - DNA, 4390 bp, Homo sapiens
tttttttttttttttttttttttgagattggtttcacattgtcacccaggctagagtgtagtggtgcagtaatggctcactgcagccttgacatcccaggctcaaatgatccgtccacctcagtcacccaagtagctgggactacagtcacatgccagcatacctgactaatttttgtattttttgaagagatggggtctcagtatgttgctcaggctgaactcaaacttctgagcctaagtaattctcccactttagcctcctaaaatgttgaaattacaggcatgagccacagttcatttttaatattttggaaaacctgcatcctacttttattgagggctgcattattcttttccaccaacagtgcatggaggttccaaatcctacatacttgacaacattgattactttttatttgttgaacagtggccatgctaatgggtgagagttaagagttcattgagattttgctttgcattcttctcataagtgattttgattgtcttttcaaattcctcttggttatttgcatagcttcttttaggaaatgtctttgaagacactggtccattaaaaaatgaagttattcacccttggtggtggttatgtttcagaagtcaaatggtggatggcatttgtactccacttagtgtttcccttgatgtgtggatatgcagaaggttttgaaagtttgatatagtaccttttctaattcccttcttgttgttcctgcttttaatgtgatattcgaaaaacctgccaaaaccaatgttactaggcttctccctatattttcttctaagtgttcaagagttatatgtcttttaattttatgttttatgtttagtgtgtgtaaagtattttgtttgcattgaagagaaaggtccaagttcgttatctttcattagacgttgagttttctcacaccattggttggggagtctgaccttttcttcactgtttggtcatggtaacctagtaaaagatatatgataatacttgcacaggtttatttctgggttctttgttctgtcatgtatctttttttcactttatgccattaccacattggttttatttttgtagctttggactcttttgacatcatgaggtatggtactttgttcttttctaaagctgttggctattcatggtaccttgagattacacatgaattttagaattatataaaatatctctgccaaataagtaacattggaattttaataaggatgacattgaatttgtacaatactcagaaatattgacagtttaacagtattacatctcctggctgagaaacatgtatttgtgtctgtgtttgtgtgtttgtgagtgtgtggattggcatcagagatagtgctgagatgcaagacaaagagttcaaagtgtttccttggcctgtctctggtctcctgcacaactcttaacatacagaaggtaggctaaccacttgatcctcaactggtttatcttcttagatgtatcattgtcaagttggtaggaaaataaaaattcctttcacaagttgaacacaattgtctgcttttggccaaatctcacacccaaagacccagaaagttggaagttaaggaagataaattctccatggtagatttgtaggttaatttgttttattgaattttttttttattttcaaattttcggcactgtgtcatttaatcagaataaggtcaccgtatatgttttatccttgcctatatttgcatatccatataaatggaaagagaacaaaagacataaaaagaacaaaggaaagaatgtaaaataagagaggaaaaaggaagcaaaaaaaatgcaattttaaaagtgctagaaattagaacttaagaaagcatctgggcagtgtaatcaccattttgttgtacaaggcccaaaccaacagatgctcctgaaacagagatatcagactgcaaataactcctgaacgttttctatttttactgtattttattctttccctaagttacctcactttgttttgtcagctgaaattaaacccagatatattagtttgtatttacactgctacaaagaaatacctgagaatgggtaatttataaaggaaagaggtagctgggcatggtggttcacgcctgtaatcccagtattttgggaggccgaggtgggtgggtcacaaagtcaggagtttgagaccagcctggccaacgtggtgaagcaccatctctactaaaagtacaaaaattagccaggtatggtggctggtgcctgtgatcccagctattcaagaggctgaggcaggagaatcacttggatctgggagatggaggttgcagtgagccaagatctcgccagaacagcatgggggaaccacccccatgatctaataagcacccgtgagttccctccccaaacgtggggattacaattcatattacaattcaagatgaaatttgtgtggatacacaaagccaggccatattattccacctttggtcactcccaaatcacgtgtttctcacattccaaaacataattaggccttcccaacagatccccaaagtcttaactcatttcagcattaacccaaaaagtctaagtccatagtctcatctgagacaaggcaagtcccttcctcctatgagcctgtgaaatcaaaagcaagttagctacttccaagatataatgggggtacaggcattgggtaaatacacccatttcaaatgggagaaattggccaaaacaaagtggctgcaggccccacccaagtccaaaattcaatagggcagtcattaaaccttaaagtgatctcctttggctccatgtctcacatttaattcacactgctgcaagaggtgaggtttcacagcctcgggcaacttcacctctgtggctttgcagggtagtctccctcccagctgcttcacagtctggtgttgagtgtctgtggcttttccaggcacacaatgtaagctgacagtggatctaccattctggggtctggagaactttgccctcttctcacagcttcagtaggcagtgccccggtggggactctgtgtgtaggcctcaactccacatttttttctgcactgccctagcagagattctccatgagggttctgcccctgcagcaaacttctgcctggacatccaggcatttccacacatcctctgaaatctaaattgaggcctctcaacttcagttcttctgtgtgcctacaggaccaacactatgaggaagatgctaaggcttggatcttacatctgaagcaatggctcaagctgtacattggccccttttagccatggctggagtgactggaatccagggaaccaagtcctgagactgcacacagcagggtttcctgggcctagcccatgaaatattttttgcctcctaggcctccaggtgtgtgagaggaggagatgccacaaaggtctctaacatgccctgaaggcattttccccattgtcttggtgatgaacatttgctcctcacttctgcagccaatttcttctgagaaaatgggtctttcttttctaccacatcattaggctgtgaattgtctaaacttttatgctttgtcaacttttggatgttttgctgcttaatttcttttgccagataaccataaattatctctcaagttcgaccttccacagatctttaggacaagagcaaaatgctaccagtctctttgctaaagcatagcaagggtcacctttattccagttcccaacaagttcctcacctccacatgagaccatctcagcctggacttcattgtccatcactaccagcattttggtcaaagcaattcaacaagtctctaggaagtccaaactttcccacatctttccttcttctgagccctccaaacttctagcctctgcctgttactcagttccaaagtcacttccacgtttttgggtatccttatagcagtgccccactgtgtcagtacgaatttactggtaagtttattttaatgctgctctgaagaaatacctgagactaatttggaagaaaagaggtttaattgactcacagttaccatggctgctaagacctcagactcttacaatcacagtggaaggggaaccaaacacatcctactttacatggtggcaggagagagaagtatcgtgcaaagggaagaaaagcttcttataaaccatcagatctcgtgggaactcactatcatgagaacagggtaagggaattaaccgcatgatctaattacctatgatatccctccccgaaaatgtgggattacaatttgaattaaaattgaaaatgagatttggctggggaggcaaagccagaccatatcatcagttctctaacaatattttactttgttgttataatccggtccaaagaataaaataaaaatgtttc

SEQ ID NO: 35 - DNA, 5198 bp, Homo sapiens
ttttttttttttttttttttttttttttggtcatttgctgtattttaaaacctcgttcaaactaggtggacaggaagtaactcatgggtgattatggcttcaaaagtctgctttttgtcatattgattgagcagtgaacagttcctagttaagtaccataagatggtgctgttaaggtttgttgttttttttctgtttcaaagctcttaaggcttttggggggaataatacacgtatctttaccaaataaagtgaaatatatttaaaataattatattttagaatatcaataatacaaactttaaatcaatgtgtaaaatgttttgctggtaaaagcacaatgattatgggaagaaacaaactcattgtactaggtttaaaatgtttgggaacatgaaaccaaaatgtcacagtctgagggaaagcgtgccaagcattattaacataaaagaggttaaataggtgagagattaagtttacagattaaattggaaataaatgaatctttgtttttgtcacaggaaagatcccccagggagaggatactaaaatgtagctagaagtgcaaaatgttttagtagagcttaactccagcgaaaggagaaggaagggtgcagaattaggggaaactgtcagacagtgatgcagagttgacaaagttgctgtcagcctagtgggagcttcggagcagagactccctgatagagtggtatgttaggcagaaatggctagaccactgtcccactgcattgtcaggtaattggctggggatcacctcacctggccagaaagttgaggtaaactctgacaaagccaataacgaggctatcagctagccacagctgggtagcaagtcttgcagctggtagcacgtcctttcttgaggggagatctgagcatcacatctctgccaaaatttataaagaaaacatcctatttatagaattaaaatgaagaaatcctatataatttgcttagaatgattatactgtgattacttgaactgcaaagttagaagtaacttaggtgctcagtaaatggtacatttctgaagggtaagttggaagaaaaagattattatttttgcttgaattttgctctgaatagcagagcagttgttctcattatgtgctatttgctggtgcagaagatcagtctttgaacatagtaataagaaatatacatttatttattcaaaggaaggcatgtgccagatgctggattacatcagaatgagcaagaaaaatacagcatctgtccaggtggaacttacagtctggtgaatacacacaaataggtaaattctctttgctgtaggagcaacacctaaacccagatttgaggtaagggaaggctgtaatttgtttttggaacaatgggttactaatctgcttaaaagtttcgagcactaatacatgtttgtccaaatcttttactcgtttttcttacatactaagacttaattgcaaggaagagaaactcaggctatcttaaagaggataatatgttatcctctggagaaacatgatactaaagacgagtgcagcagggagtactagaacggggaatgtggtactggaaggactcttgttcatttctgatatattgtatgggtctgtgtaatgctttcctctctataaaactggtcacttccagttcagagtggtgagaatcatgactgctaacctatcttcattattatgcttgacgccttcagccaccacaggggacatttctttgattccataacagattcaaagtccagaagtgccagagaaaagactagctgaccagtttggttgatgtatttacctggagtgttctttcatgttggaaaatacattcaaagagttgggttaggttgttggcttgtgcttcagggtctgaacagtagaagcattaatatgcaccaagggatgatagtactggcttttcaccatatttttatttcttataacactggtaaatttgctaagatgctttcatacaccatgtgtgtctttgggttttgtcttatttttaattatcatggatacataaagattgtacatatttatggggtccatgtgatattttgatacaagcatacaatgtgtaatgatcaaaccagggtaattggggtatccattacctcatgcatttatcattgctttgcgttaggaacattccaattccactcttagttactttgaaatatacgataaattatttttcactatagtcaccctattgtgctacagaacactagagccatccttttatctaacaacatattaattgaaaaaggtgtcactttaagattattaggattttttttttttttgagatggagtctcacttgcctcccaggctggagttcagtggcgcgccctcagctcactgcaacctccacctcccaggttcaagtgattcgcctgcctcagcctcccaagtagctggattacaggcacatggcatcacaccccgctaatttttgtattttttgtagagatggggtttcaccacattggccaggctggtctcgaacttctgacctcaagtgatccacccgccttggcctcccaaaggcgtgagccaccacacacagtcaaatcattagaattttaagtaattcaaattggaatgattaattccaataattagaattaagtaaatttaaagtaaacaatgctaccatctcaaagagcaaattaattgcattatgtggtagctgtctaatagagtagctgctggctatgtatggctattgagtattggaaagggagctagtctgaattaagatgtgctgtaagtatgaaatgcacattggattttaaagacttcatatcaaaaagtaaaatatctcaatatttgtatgtagattacaagttgaaatttttgtgtatattgagttaaatctcaaaattaatttcatctttttatctttttaaatgtagctactggaaaagttgaaaattaacatgcagcttgcttatttctgttggacaacactactgtagaccagcgggtctcaaacagagcagagagtttatgaacacacagattgctgggccctaaaaatttagttcctagttaagtacctttatattttgcttagaaagattatactgtatttgttaatgtttatttgaattgtgaagtgtgaagtaattttctgattcagtaggtctgtatgaggtctgagagtttgaatttctgacaggttcccaggtggtactgatgctgctgatccaatgaccacattttaagaaccactgctttagaccaggccctaagtagggccagatagtaagtgttttaggcttggggtagaggtgagggtggggaagtcgcttaacccagaattctataaccaatgaaaattttctttaagactgaagatgaaatacaattttcaaatgaaagaaaacaaaaattcgttgtccaaagacctgcactaaaagaagcttttcagattgaaaggaaataatgcaaatggagatttagatccttataaaacaatggagggtgtcagaaatggtagatatatgggtcaatgcaaaaggctttttaatttttttcctgatttcttttaatacatacaactttatagtaagaataacaactgtatcttgttgggtttataatgtacatagatgtaatacatataaacatgatagcataatgattagaaatgggatttgggcctacagttgcaaggttgtattatagtacataatatatgttattattatatataaatatatacatatatttgagacagagtctctgtcatctaggctggagtacactggcatgatctcggctcactgcaatctttgtctcctgggttcagatgattctcatgcctcaacctcctgagtaactgggattagaggtgcacactgccatacccagctaatttttgcatttttagtagagactaggttttgccatgttggccaggctggtcttgaactcctgacctcgagtgatctgcctgccttggcctcccaaagtgatggaattacactgtgcccagcctcacataatacaaaattgagaagaggcaggaaaggaggaataaaaacaaaaaacagaggagacaaatagaaaacaataaaatggtgggctcaaacaaccatatccgtaattatattaaatgttaggggattaaacactttaactgaaaggttaagattgtcaggatggataaacacacatatacataattgtatgctgtttatgagagacttacttttcatataaagacacagctcaaaataaatgggaaaagagatacactatgcaaaccgtagcactagaagtttggactgactatactaatgtctactaaaatagatttcaaaacaaaaagtatccccagagataaaatgtatatttcaatttcataatgtcaaaagagtgaatttagcagtaagacattacaataatagatttgtatgcagctaataacagaccttcaccatatacaaagcaaaaattgacaaaattggagagtgaagcagtttcagagttgaatatttttacattttctatttagaaattgatagaacaacaagacaagtcattaacaggaacctagaagacctgaatcacactatcgaccaccttgattcaacttaccttttcaaaactctacacccaacaatgggtgtgcacatcatatgtttaccatgatagtccataagattggccttaaagcagctgtaatacatttgaaatgattgaaaaaagttaatctacctgaggatagacaggtcaataaaacagagaagagtccaaaaattgatgcacacatatatgacccattgacttggtaaaagttccaaggcaattcaatgaggaacaaatagcttttttttttttttttttttgagacagagtctctctctgttgcccaggctggagtgcagtggcatgatctcagctcactgcaacctctacctcctgggttcaagtgattctcctgcctcagcctcctgagtagctgggattacaggtgcctgctaccatgcccagctaatttttagtagagatggggttttgccatgttggccaggctgttttcgaactcctgacctcaggtgacctgcccaccttggcctcccaaattgctgggattacaggtgtgagtcaccgctcccggcaagaatagcctttttacaaatggtgctggggcaattggataaccatat

SEQ ID NO: 36 - DNA, 4550 bp, Homo sapiens
ttttttttttttttttttttttttgagacggggtctcgctctcacccaggctggagtgcagtggcgcaatctcggctcgctgcagcctccgcctcctgggttcaaccaattctgccacagcccccgagtggctgggattacaggcgcctgccaccaagcccagctaatttttgtatttttggtagagacagggtttcaccatgttggccgggctggtcttgaactcctgacctcaggtgatctgcttgcttcagcctcctaaagtgctgggattacaagcatgagccactgcgcctggtctagtttatggaaaatttttatcatgaatgggttttggattttgtcatatttttctggatctattgatgtgatcatatgatttttcttgagtttctttatgtgatagattctattagttcattttcaatatctgaaccagccttgcgtatctgggatgaatccctcttgatcctggtgtataattcttatacattgttgaatggatttgctaatactttattgaggatttttacatctatgttaattaaagacactggtttgtagttttctcgtgatatttttgtctggttttggttttaggcctcatagaatgagttgggaagaattccctctgcttctaccttctgaaagagtttctacagaattggtatcgtttttagaattcaccagtgaacccacctcagtctagcattttctgtttgggaaggcaatagattcaattttaaatagatacaggtgttatttggagtatctatttcttctggtgtgagttttggcaggttgtgtttcaaggacttcttcgtcatgtaggttatcaaatttgtaggcatacaattgtgatactcctttattacctttgttacgtccatgggatttacagtgatatcccctctttcatctctgatattaatttttgtctctctcagtctggcttgacagaggtttactgattttatcaatttttcaaaaaccagcttttggttttatcaattttctctgttgacttcctgattttctgcttgatggatctcttcattctgatagaggagtgttgaagtctccaactataatagtgaattcaactttttctgtgttaacctattctctaatttgctataaagaaatacctgcgactggataatttataaggtaaaaaggtttaattggttcacaattctgcaagttgtacaagaagcatggtgcaaggcatctgctcagcttctggtgaggcctcaggtaacttgcaatgatggcagaagccaacaggggacctggcatctcacatagcaagagcagaagagaatgagggggaagatgctacacttaagcatctagatattgtgagaactcactatcacaaggacagcaccaagtggatggcactaaaacattgatgagaaatctgccccaatgatccagttatctcccaccatgtcctacctccaacaaacagtggggattataattcaacatgagttttagaggagaccacatgcaaactgtatcattctgcccagcatctcaaatctcatattctcacattgcaaaatacaatcgtcctctgccaatattctcccaaaaatcttaactaattccagcatcattcaaagtacaaaggccttctgagacaaggcaggtctcttccacctataagcctttaaaatccaaacaaggtatttactcccaagatacaatgggggtgcagatattggataaatattaccattccaaacaagagaaattagccaaaagaggctgcaggccccatccaagtctgaaatacagcagtgcagtctttttttaaatatcccaaataaccttctttgactccatgtcttaccttgtgcctcacaagagcacattggtataaggagtgggctcccaaagccttgggaagctctgcctctgtgactttgcagggtaaagggttggagtttagtgcttgcagcttttccaggcacagagtgcaagctattggaggatcaaccattttggggtctggaagacagtggcccccttcccccagctctctgaggagcaccccagtgggactctgttgggcctccaaccccacatttcccccccatactggcttagtagaggttctctgtgagggctccatctctgcagcaggcttctgcctggttactcaggctttctcatacatcctctgaaatctaggtggaggttgccaaacctccttcacccttgcactctccacacctgcaggcttaacaacacgtgttagccaccaaggcttatggcttgtgccctgcacaagtggcaccccatgccttacttgggccctttagagctgagcagtgtcccaaggctgggcagccccttctctatggctgcttttacatttttttctttcatttcaaccttggaaaatcttatgcctatgtgcctcaggtatggtcttcttgtgaagtatctcccagggcatttcctcagtttgaatgttggccattctagtgaggttggggaaatttcatgaacaatatcctgaaatatgttttccacgttgcttgctttcttcccctttggtttcctttacataatcccctatttcttggaggttttgttcattctttttgttttagttcagtgagccaatctttgagctctgagattcttttctcagcttggtctattctgctggtaatactcgtgattgcattatgaaattcttgtagtgtctttttcagctctatcagatcagtttggttctttcttataatgcccatttcatctatcagcttctgtatcattttattgtaatccttagatttcttggattgggttttgacttttctcctgaatctcgatgatttttgttcctatccatattctgaattctacttctgtcatttcagccatttcagcctggttaagaacccttgctggggcactagggtggttgtttggaggaagagactctggcttttcaagtagctatatagcaatgctccactcctcagtaccaattttctgtggcaggccatccttatattgcaaaaaatacctgaggctgggtaatatataaagaagcttaattggcttatggttctataggctgtacaagcagcacagtcccaggcatctgctcagcttctggtgaggcctcggaaagcttacaatcatggtggaaggcaaaggaacccgatgtctcacatagtgagaatcaagagtaagagagagtgaaggaagaagccatatacttgtaaacaggcaaacctcatgagcacgcaccatcacaaggacagcatcaagtggatggggctaaaccattcatgagaaatctgcaccaatgatgcagtcacctcctaccaggttccacctccagcactggaaattacaattcaacaagagagttagaggggtcaacttccaaactatatcattctccctgcagttctatcagtttttgcctcatgtatcctgatcctctgttcttgggtgcatacatgttaaggatagtcatgtcttcttggagaatggacccctttcatcattatccctgatagtaattcttgctgtatagtctgctattctataatatacctgtttcttcattttggttagtgttagcctggcatatttttctctctttaatttgtatgtctctttacatttcaagtgggttgcttgtaaccaacatataattgggttttgttctttgatcctgctttgacaattttttctttttaaactggcccagtttttccatataataatctatcttttaattggtacatttacacccttgacattcaaagtatttatatatttggataaacatctaccataatgttactgttttctatttgttaaccttgttctttattcctatttttgtcttccattcgtcttgtgcctttgatggtgttaatttggcattttattattctctcttctagcgtggttttcttgtggttgcccttgtgtttgcagtatagatttacaaataatgcaacccctctttcaaataataatatactgcttcttgggcagtgtaccttatagtaacaaaataatcctaatttctctttcctatcccatgtatcattgctgtcattccacttatatataagcacccctaagtatgacgactatacacacacacacacacacacacacacaaaaatatatgtgtacaaaatcaaatacattgttgccattattttgaatgaactgttaactgttagattaagaattggtaccatatggaacaggttagtggaacttactataaaaggcttttctttgggggaaatttttaattactgaaactatttaggagctgtgggattacatgtctatcttcaattagtttgagtaaaatactcgtagtaatttgtgtattttgtcagttttcaaatgaattgttcataatatcctcacattttcaaatttcaactgcgtttataaaattttcatttttccattctctattgtgtcttcttgctcgatcttaccaaaatattttggtttagtgctttttcaataaacaagttctggcttat

SEQ ID NO: 37 - DNA, 4338 bp, Homo sapiens
tttttttttttttttttttttttcctttacattctgggatacacgtgcagaacgtgcaggtttgttacataggcatacatgtgccatggtggtttgctgcacttatcaacctgtcatctaggttttaagccctgaatgcattaggtatttctcctaatgctctccctccccttgcctccaacctcctgacaggccccagtgtgtgatattcccctctctgtgtccatgtgttctcattgttcaactcccacttatgagtgagaacatgcgacgtttggttttctgttcctgtgttagtttgctgagaatgatggtttccagcttcatccatgtctctgcaaaggtcatgaactcattcttcttcatggctgcatagtattccatggtgtacatgtgccacattttctttatccagtctaccattgatggacatttgggttggttccaagtctttgctattgtaaatagtgctgcaataaacatacttgtacatgtgtctttatagtagaatgatttataatcctttggatatatacccagtaatgggattgctgggtcaaatggtatttctggttctagatccttgaggaattgccacattgtcttccacaatggttgaactagcttatactcccaccaacagtgtaaaagcattcctatttctccatagcctcaccagcatctgttgtttcctgactttttaataatcaccattctcattggtatgagatggtatttcactgcggttttgatttgcatgtctctcatgaccagtgatgatgagctttttttcatatgtttcttgggggcataaatgtcttattttgagaagtgtctgttcatatccttcaaccactttttgatggggttgttttttcttgtaaatttgtttaagttctttgtagactctagatattagacctttgtcagatgataaattgcaaaaatttctcctattctttaggttgcctgttcactctgatgatggtttctttgctgtgcagaagctctttagtttaactagatcccatttgtccatatttggcttttgttgcaattgcttttggtgttttagtcatgatgtctttgcccatgtcctatttctaaggcattaggcaggaggaattctttcttactttggagagggtcagtcttctgttctctttaggccttccactgattggatgaggcccacctcattagggagggccatctgctttactaagactattgattcaaatgctaagcgcatccaatacgattctcatagaaacacctggaatgatgtctggccaaatatttgggtgccctgttactcagtcaagttgatacataaaattaaccattacaggggctatgagctggggaccaacagcctttaaaggcagagaatgacatccagctgacagctaggatggaaagagggacctatggccacatggaactgattggcgccaatagcctgaatgaacctagaagcagatcctcccctgccacacccacaagcttccatataagaggctagggtggccaacaccttgattctggactcgtgagacccagagcagaggaatcatctgcacccacccagacttctgacctgcaaaatgtaaaaataataatttgtgttgtttaaagtcactttgtttctggtaatttgttatgggaaatcaatgtgttatttttctccttataattttccatctctctttcttccatttaaacaggaagttggctctgtgttttagggagtcatgagggtaggtggagagtatgtccagaatttgtcttcacattttaaataaatttatatttcaatataaatattaataaaaaataagatacacatacatacatttaagtatataataaaacaaaaagtataaaatatttctactttatatgtatattttgatgaatataaggccatagggaaaaggaattcttgagtttagatagagtgtctagatgagaggaaatcagaggcaggaaagggaaactgtttcctgtaaccctgatctctcactggcgttgtgggcaggagactgggagggagaagtaaagggaccaccagaaggtccttaggaactgaccgccagaaaggacacattgcctagaatgaggttgggggctgggcctgatgaaagacctccactgggagcatcacttgaaagtccaagagtgatgtgaagcctgtgccgctgctcctatgctattcctacactgcacacacctccacatgcacctggggggcatgaagggatgagcttgacagtcccctaggctgggaaagatgtggtcaacaaccccgccactttccaatagcaaaaccacggatctctgcctccactcagtttccccttacattcaggggtttgtggggtgtcttatacatgttctcccatgcacaggcctttcagtcatccctcgcatggccaatctcctgggctccactctgtgggttgtgatgatgtttccggtgctaccagcccacaattctgctctgcgtccccagtctgaacagtctgagttctccactcacgcactctgcatctgtttcaggcacctcagcaaggaagggttcctcagttctaccctgggagctacatggtgacacattctacaaagtggcaccacctcctggctttcttcaactcacagaaatatctccaaaaagcaggtgaccacatactttaacacctaaatctgagcacttttgataatgaagggaaggagctattgataatgatgccaggacaataggcatctaagacaaggttatccaggcaaatcaagtgatatgtttggctctgtgaccccacccaaatctcatctcaaactgtaatccccatgtcgggggagggatcttgtgtgaggtgactggattatgggggccattcccccatgctgttcttgtgttcgtaagttctcattggatctgatgatttaaaagtgagtggcagttccccgctcgctcacactctctctcctgcaaccatgagaagaaggccctggctttccctttgccttctgccatgattgtaaatttcctgatgtctcccagtcatgctttctgttaagtctgcagaactgtgattcaattaagcctcttttccttataaattacccagtctcgggtagctcttgatagcagtgtgaaaacggactaatatctcatgggtgtcgtcaccctaggaaaaggctcttctcttggtttacattgttggccacagcctctgctgtctggtgcactatggtaggggtcctatcatgcctgggatgggtgtcgggaagtggggaggaagatgcactcactgatttgctggattcaagatctcccctctgtttcctgcttactcttgctgacaacccatgctgggctgtcttgtcttcccttgtttcaggttggggctttccctgaacgtttcttgtccctcaagcagataggttcatgccagactctctttacgtcctccaggcagaccgggcaggagtggattcaaaggtatacagagctcatactgccaaaccgtgcatttgcacgattgctgagttatggtcacacaactagaaaggaattgagccagaactagaatccaagtcctttgaattccattcctgtgctttttcttcaacaccatgaagtttcaggtagctacaggatagactcctggcataatacctaccatgcttggctgagcagaactaggctcttcacgtttcctcaccagacactttattactctcacatcccatgggatcgcatgactgggcccacgtatctttccaaaagtcatgcttcctctatttagaagaacaaaatgcagcctctatagaaactactgtgaacagaagtaaagaagaaaactcacctgagctaaaattttttttaatgagaaactaatttagtagccctctagtttgaatattcatgcctttggtcacaggggaggcagcattttctcgatggcaggtggaaggcaaaggtttggaacctgggccttaagatccttttgtgtctgccgttgtaccgccacggagccttgcttgattctcactacacagtctgaagacactgtctgtgtactctccagaagtgtcatacatttagattttattgttataaaatgaccaggtataattttgtaaggtgaggtcagaaatattgcagcctctcccactcccccccacctccttttaaagctagtttattaagttaaaaaaggaagaaatgcgccttctaacaaacagactaaattagacttttctcaacccttgtcatttaaaagatggtgttgttgaaacttcagagaggttaaacgtatgccacaatttgag

SEQ ID NO: 38 - DNA, 3062 bp, Homo sapiens
ttctttttttttttttttttttttttgagatggagtcttgctctgtcacccaggctggagtgcagtggcacgatcttggctcactgcaagctctgcctcccgggttcacgccattctcctgcctcagcctcccgagtagctgggactacaggcacccgccaccatgcccagctaatttttttgtatttttagtagagacggggtttcactgtgttagccaggatggtctcgatctcctgacctcgtgatctgcctgcttcagcctcccaaagtgctgggattacaggcatgagccactgcacctggctgattattcacatttttaaaagaggatttgagaaatacaaacacaggccactttacacaataaaataggcaacaataacatacgtatgtttgcaagcataagcagttctcagctctactaatgacagtcacatgggtatgacagttatgaacagatgagtggtatttataaagaaataggtcaaaaagggaaatgtatcaatgcatagccctgtggttggtaattgtgtatgctcagctttataactgcagtcatttgaaatactttaagaacaaccagtgtcttccactggcttcactcagatgctaatctctggaaacacttgcacagacacactcaaaacactaataagtttctaggtgttccttaatccaatcaacttgacacctaaaattaagtcccaaagaacacctcttatcaactcagcacccatacatacctccttaaaccgtacttaatttccaaataaagacaatgagaaagttgtagttctacctatcatgatgccagtatcctctgattgtgatttttgggattttagacattatggattttagattaggcattttgatcttttgggatttcaccattcaggattaaggtgttcgagattgtgtcttacaggattataaaccaaaccctttttgggattgggtttgtttcgccccagtcagccttattcttcagagattcttccagtttgttgctgtatcaatagttcacttttattttattttgttttatttatttatttgggatggagtctcgttgcccaggctggagtgcagtggcgccatctcagctcactgcaacctctgcctcctgggttcaagcaattcttctgcctcggtctccctagtagctgggattacaggcgcgcaccactatgcctggctaatttttgtatttttagtagagacggagtgtcgccatgttggccaggctggtctcgaactcctgacctcaggtgatccacccgcctcagcctcccaaagtgctaggattacaggtgtgagccactgtacctggccaatagttcacttttattgttgagtagtatttcatggtatgaatatactgtagtttgtttaaccattcacccattgaaggacatctgggttgtttacagtttgggaccgtaatgagtaaagctgctgttagtttctttgtgaacacagtcttcatttcttctggataactgcccagtagtgcagttgttaggtcatatgataattgcatatttaaagaaactgctgaactgttttcctgggtgagtcagactgctttacattcccaccaagaacatatgggcgatccacttcatccgcattctcaacaacatttagttgtgtctctgtgttttattttaggcattctggtaggtatatagtgatagatatataacttactctggttttaatttttatttctttaattggtaatgttgttgagtatcttttcatgtactcattttgccatctgcatatcctgttaggtgaaatgttactttatatctaattggatttttaggtttttttttatttttgagttttgagagttctttatgtattctacatactagttctttgtcagatatgttgcttgcagctgtttcctcccaatatatagcttgtctttctttttttttcttttttaagacagtctcgctctgtcactcaggctggagtacagtggtgagatcacagttcactgcagcctcaacctccagggctcaagcaatcctcccacctcagcctcttagtagctgggactacaggtgcctgccaccacagccagctaattttttttttttattattagtggaaacgaggtccctatgttgcccaggctggtctcaaactcctggtctcaagcagttctcccgctttggcctcccaaaatgctgggattacaggtatgagtcaccatgcctagcctccaatgtatggcctgtcttttaatagagttttgtagagtacaagattttaatttttctgcagtttatcagtttttccttttatggattgtgcttttggtgtcaaaagtaagaactctgccgagcactagcttccgaaatttttctcatacttttaatttttttaaaaaaattctctagttttacatttaagtctgtgatccattttgagatttttttttttttttttttgacttatgaacatccacttgtactgggactatttgttgaaaaaggtctctggctgcttttaaggtttacctttgtcttcggtattctagaatattccactataatgtgtctagatagggatttcctttatctttcttgttatatcctgtgtctgatggcttaatgttttttattattctggaaacttctctgccattttttcttcaaatagtctctctccacattctatctattatttccttttgtaatcttagtcagttttatgtaaggctttctcctcttgttctttgtatcttaactcatattatccagatagtttattctgaataattgtttcaggtctatattccaggtcacccactctttttcacataagcccagtctcttatttaacccatccactgaatttttaatttcagtaattttttgtttttggagttctgtttgattctttcttgaattttcctggttatttttgattttctgttgttctttgctcatttatttccactctgttttatttacataattatattgtttctgataattccagtatcttaatttcttaagaattaaaaaagttttcct

SEQ ID NO: 39 - DNA, 2312 bp, Homo sapiens
ttcttttttttttttttttttttttttgttctcttgtttaagtctgtttgcacaaaactaggatttcctgtgctcttcgcttgcttttttctgatttccattttcttggtagattttcctccatccctttattttgagcctatgtgtgtctttgcacgtgtgatgggtctcttaaacacggcgtatcaatcggtcttggctctttatccagcttgcacttctctgtctttcaattggggcatttagcctatttacatttgatattagtattgttatgtgtgaatttgatcctgccatcatgatgctagctggttattttgcagacttgtttatgtggttgctttatagtgtcattggtctatgtacttcagtgtgtttttgtagtggctggtaatggttttttctttccatatttagtgcttccttcaggaactcttgcaaggaaggcctggtggtgatgaattctctcagcatttgcttgtctgaaaaggatcttatttctttgcacataaagcttactttggccagatactaaattctggcaaagaattctttaagaatgctgaatattgacccccaatatcttctggcttgtagggtttccactgagatgtctgctattagtctgatgggcttccctttgtaggggacctgacctttcattctctctgactgccctttacattttttaattttgaccttggagaatctgatgattatgtgtcttggggttgatcttctcatggagtatcttaccggggttctctgcatttcctgaatttgaatattagcctgtcatgctaggtttggaaagttatcctggataacatcctaaagtatgtttccaacttgtttccattctccccatctgtttcaggttccgcaatcagtcataggttcagtctttttacataactccatatttttttcagaggttttgttcattactcttcattctttctctattcttctctgcctgtcttatttcagaaagatagtcttcaagctctgagtctctttcctcctcttggtctattctacaattgatacttgtgattgcattgttaagttcttgtgttgtgtttttcagctccatcaagtcagttatgttcctctctaaactggctattctggtcatcagctcctgtattgttttatcatgattcttagcttctttgcattgggttatgccatgctcctttagctcagcaaagttcattacccactttctgaggcctacttctgtcagttcagccatctcagcctcagcccagttctgtacccttgctagagaggtgctgtagtcatttggagaagaggcgctctggctttttgagttttcagcatttttttgtgttgactttttatcatatctgtgggcttacctaccttcaatcttgaggttgctgacccttgaatggggtttttgtggggtctttttgttgatgttcttgttgttttctgcctgtttttcttttaacagtcaagccactgactgtcagcaactgtagggctgccacagtttgctggggtctgctcgagaccctagttgcctctgtttttcccgtacctggaggtgtcaccagtgaaagctgcaaaacagcaaagatggcagccttctccttcttttggaaactctgtcccagggggatactgaccagtttctggcctgaagactcctgtaggaggtgtctagagactcctgttgggaggtctcactgagtcaggaggaacaggatcagggacctacttacagaagcagtccaactgcttttggtacagcaggtgtgctgtggtgggggaggacccttcctcacccagattgcccagactctccaaagccagcaggctggaacagctttgtcaaccgaaccatagagacagtggtcgccactcccctgggagctccatctgaggtagagattagatttctgtcagtataagcctggctggagtgactgaagaccccccacagggagaccccacacagtggggaggaatggatcagggtcctgcttaaagaagcagtctgggccaggtgcagtggctcatgcctgtaatcccagcactttggaaggctgaggcaggcggatcacctgcggtcaggagttcaagaccagcctggccaacacggtgaaaccctgtctctatgaaaaatacaaaaattagccaggtgtggtggtacctgcctgtaatcccagctacttgggaggctgaggcaggagaattgcttgaacccaagaggtggaggttgccatgagccaagagcatgccactgcactccagctgaggtcaacagagtgagactcatc

SEQ ID NO: 40 - DNA, 3549 bp, Homo sapiens
tttttttttttttttttttttttttttttccacaggtgttatctcataaaggagataattttaaggtatgaaatttgaaattttttttcttttggggcacagtggctcactactataatcccagcacttggggaggccaaggtgggtggatcacctgaggtcaggagttcaaaaccagcctggccaacatggtgaaaccctgtctctactaaaaatacaaaaattagctgggcatggtggcgcaggcctgtaatcccagctactcttaggagaatcgcttgaagccgggaggtggagtttgcagtgagccaggatggtgccactgcattctaacctgggcaacagagtaagactccatctcaaaaaaacaaaaacaaaaacaaaaaaactatggagttaaaccaatgaattttttttcttttgaatagcaaggcattgcatatttggcaggtttttaaaaattgtttgcagcaatagaagtaattgtttacaattggttcctgtttctgactggataaaactcatagtagcaaaaaactttcacaataacagctcctgaaaagttgaagttggtcataaaataaattactaattttaaattcataaaagaagtacctgactataactgccaaacatgaaggtatcaaagtactaatgtactcatgtccttgtacaactgacctgtatcagagtgcctcattttcaaattaggactctctcatatttctacaatttccaaatgcattatcaattttttcattgtttttgaaatccgaagaatttttaacatgactgtaaaagtatttaaggatatttatatcttcaaatgttacaaaattattattaaaaacaaacataaaataaggtaaaaggaaatgaataacattaatatccatatctaatcactgggattatacattcacagtgcaggccaggtgcggtggctcatgcctgtaatcccagcactttgggaggccgaggcaggtggatcacttgaggcagaagttcaagaccagcctggccaacatggtaaaaccctgtttctaccaaaatacaaaaattagccaggcgtggtagtcctcacctgtagtcccagctacctggaaggttaaggcatgagaattgcttgaaccccaggaggcagagtgcattagtctgttttcacgctgctgataaagacgtacccaagactggataatttacaaagaaaagaggtttaattggacttacagttccacgtggctggggaagcctcacatcatggcagatggcaaggaggagcaagtcacatcttacatggatggcagcaggcaaagagagagagcttgagcagggaaactcctctttttaaaaccatcagatctcatgagacttattcactatcacaagaacagtacagaaaagacttgcccccatcattcaatgacctcccacctgtccctcccacaacacacagaaattcaagatgagattcggatggggacacagccaaaccatatcattctgcccctggcccctcccaaatctcatgatctcgcatttcaaaaccaatcatgcctttctaacagtcccccaaagtcttaactcatttcagcattaactcaaaagtccacagtctaaagtctcatctgagacaaggcaagtcccttccacctatgagcctgtaaaatcaaaagcaggttagttacttcctggatacaatgggggtataggcattgggtaaatatagccattccaaatgggagaaactggccaaaacaaaggggctacaggccccatgcaagtccaaaatccagcagggcagtcaaatcttagagctccaaaatgttctcctttgactccatgtctcacatccaggtcatgctgatacaagaggtaggttcccatggtcttgagcagctctgcccctgtggctttgcagggtacagtctccctcctggttgctttcataggctggcattgagtgtctgtggcttttccaggcacacagtgcaagctgtcagtggatctaccattctgggtctggaggacagtgccccagtagggactctgtgtgggggatccgaccccacatttcccttctgcactgccctagcagaggttctccatgagagccccacccttgcagcaaatttctgcctgggcatccaggcatttccatacatcttctgaaatctaggtggaggttccaaaacctcaattcttgacttctgtgcacctgcaggctcaacaccacatggaagctcaacaccacaaggcttggggcttgcaccatctaaagccagggcccgagctctacattgtcccctttcagccacagctggggcagctgggatgcagtggaccaaaccccaggctgcacatagcttggggaccctgggcccagcccatgaaaccactttttcctcctaggcttctgggcctgtgatgggagggactgccgtgaaggcctctgacatggcctggagacattttccccattgtcttggggattaacatttggctcctccttccttatgcaaatttctgcagctggcttgaatttctattcagaaaatggaattttctatcgcattgccaggctgcaaatttttcaaacttctatcctctgttttccttttaaaactgaatgctttcaacagcacccaagtcacctcttgaatgctttgctgcttagaaatttcttctgccagataccctaaatcatctctctcaagttcaaagttccacacatctctagggcaggggcaaaatgctgccagtcgctttgctaaaacataacaagagtcacctttgctccagttcccagtaagttcctcagctccatcggagaccacgtcagcctgggtcttattgtccatatcattatcagcatttttggcaaagccattcaacaagtctctagaaagttccaagcttttccacattttcctgtctttttctgagccctcaaaactgttccaacctctgcctattacccagttccaaagtcgtttccacattttcaggtatcttttcagaacatcccactcctggtaccaatttactgtattagtccgttttcatgctgccgataaagacatacccgagactgggtaatttacaaagaaaagaagtttaattgaacttacaattccatatggctggggaagcttcacagtcatgatggaaggcaagaaggagcaagtcacatcttacataaatggtagcaggcaaaaagtgagatctcatgcaggggagctcctctttttaaaaccatcagatctcagctgggcacagtggctcacgcctgtaatcccagcactttgggaagctgagacaggcagattatctgaagtcaggacttcaaggccagcctggccaacatggtgaaatcccctctctactaaaaatacaaaaattagccaggcatggtggcaggcaactgtaatcccaactacttgggaggctgagacaggagaatcacttgaacccgggaggcagaagctgcagtgagctgagattgtaccacttcacaccagcctggtgacagagtgagactctgtctcg

SEQ ID NO: 41 - DNA, 1708 bp, Homo sapiens
tttttttttttttttttttttttttttttccttttgagatggagtcttctgtcgcccaggctggagtacagtggcatgatctcagctcactgcaacctccgtctcccaggttcaagtgattctcctgcctcagcctcccgagtagctgggattataggcatgtaccaccatgcctggctaatttttgtatttttagtagagatggggtttcaccatgttggccaggctggtcttgaactcctcacctcaagtgatccacccacctcgccctcccaaagtgttagtattataggcgtgagccactgcactcagcctgatgttccctcttttataagtgccattccttcttcctacctcacaacctagcaaaattggattcttcaaaacgccaggttggcctttcttgactccaaaagaggtgactcttgtagcattcttacaggcctaacatagcacttactttatgttgcaatgctgtgtgcaatgctgtgtttttttactcactagctctgagcaaaacattatttattcttggtaattgtaacacttggtagtgaagacatattttttgccatataatggattatactttgtatttgaatccatgtgaatcagtagcatattggtcttcattgtttttcctccttctccgacgtttttttgagacagggtctcactctgttgcccaggctggagtgcagggcacaattacagctccctgcagccttgatttctcaggctcaagccatcctcttgcctcagcttccctagtagccgggactataggtgcatgccaccatactcagctaatctttttaggtttttagtagagacaaggtctcactatgttgcccaggctggtcttgaactcctaagctcaagcagtcctcccgccttggcctctgaatgtgctgggattacaggcatgagccactatgcctaaccatattttttccaatattaaaaaatctttttttccccctaaggaatgtgttatataaggtcaacatgtttttagtgcttcagtttgacttgtctacatctaaagttaactctttaaggcttacatttatgattataattctttccatcgagggatttagtctccattattgtcatgtttcttgatttttttcattatacttggttcttctttttgtctaggttttatatataccttaattaattctttcttggctgttttatatctatgttgctgtcagcatgggaatctctattattagaaagctattaacttttaaaatatgtatcttttggtgattttctttgttctaacagttttagatggcctgtttgctctttctaaatataaaatcataggtatttctattttgtttttgtgtttcataaaattgtaataagtttttttgatattttttcattacatatgaagttaattgttggttttaaacaaatgttctttgttaggataacagaaataacatcttctattcttgtttgttggaagctaaaagcttgataaaaggaattggtgtcttttgatacaatcaaatttttatcacttaaattgcctaatatgattataataagggtttttgtaatattaaaacatccttaaattcctgagataaaactctacctggttatagtatatgttcttttaatgtattatctttcctatttgctgtacatctatacattcataacataaaattcatttatattt

SEQ ID NO: 42 - DNA, 4471 bp, Homo sapiens
tttttttttttttttttaaacaggaaattctcttataagtgacttgatgctttccttttgctgtttttagaattctctctgtgtttgacttttgacaatttgattgtaatgtgccttgcagaagacctttttggtttgaatcttttttgggattactgaacatcctgtatctggatgtctgtatctcttgcaagacttaagaaatgtttgactgttattttgctaaataggttttctgtgcctcttcccttctctttcctgaaacaccgagaatttatttggtctgactgggttatttcaaaagacctgtcttcaagttcagaaaatcttagttttgctttatctagcgtacttttgaagctctcagttgcatttttaaattttattcattgaatttttcagttccaggatttgtttggttatttttctatatctatctctactgactgtcttattcagatcatgaattgttttcctactttgtattatctgtgttctcttgcaacttgctgagtttccctaagatcattattttgaattccttttctggcatttttatagatttccttttcttttgaatctgttactggagaattattgtgtctctttggaggtatcaaatttccttgctttttcatgtttcttgtgtccttacattgatatctattcagctagtggaagagttgcttcttccaattttatggattggctttcataaggaaagacttttttgtaggcatatctgtagttttggttgtgattaggatgttttggctttgattctggtgagcacaggagtgtaggctcaatgatttcttcagctgtaaccaatgtaactggtgtcatgtaaccatgtcactgtgagtcctcagtggcttaagttgccattgttagctgaggctgttgtgaggcttttctggggaaagggatgccagaggggccagtccctgggccttttggtggcatgggcaggctttagctgtggtggcgatgggctgggcatgctagtcctcaggaccccagctggtgtaagtgctggtagtggggggcccaggtgggctggtcctcaagcccccaggcagcatttatggtgctggcagtggcagtagcagcagtgggctagacactggactgtcaggtggcaatcatagctgttggcagtagctgtggcaggatgaatgggacagtttctagccccctaggtgatgcacttgggtgggcactggtggtaggtggggcaggcctgttcaggccttgggattgtgtgcgtgggcaccagtggtgttggatggggtgggccagtcgtcaggcccccctacagagcatataggcaccagtagtggcatgagggaaagatagcgctggagaacactggtgacagtgggtggagcaggcctgtctttaggttcttggatggcacatatggacatactggtcctcaggccccctgaaggtgcacacaggcatgctgttgccctgctgagaggggcaaggttctgttggtggcattggtgttgggaagatggctcccaggttctgggagcttcagctccctttttcctggggtagcctccctggtgtgctatactgcctgttccctgggatataagacacttcatgggtcagagtactggggacctggctgcactgctgggtgattgtgatactgcaaccttctggatggatgtgggaggatgttcttgggggtccagggatgtggactgcaggggcttattggaccccaagtgggcaggatataatctggtgggggctagcctcttaaaatggtgctgtgccacagcagcatgtttcttgggatgtgagtaggatccagtggaattccctttctggaagaacgcatttgcatggattccaggcagctccgtatactggactcagggcctgtgaaggctgacggcatcccctgtgggtgccagcatctgtgctgcgaatgtggaccactgcagttctttgacttttcttttcccagaaatgggattcccctcctgcttctgagccagtccaagacatgctggctgctttatttactgctccctttgtgcctcagaagttccctgttgaatagtgttctgtctttggtgctctacctgacatgtggttaactacttgcttttttggtcctttgttgtgcaggagttgagtgccaggctcacggttttttgattaccatagttttgtagtttttgaaattcagaagtgtgagacctccaactttttctttttcaagattattttggctgttgagtcaattatgattccatatgcattttagatggatttttctatttctggaattgtgccattaggagtctgatagatactgcattgaatctgtagagtgctttgggtagtattgacatcttcccactattaagtcttccagtacatgaacacatgcattttcctgatgactaatgatgttgtaccttttcatatgcttattggctatttgtagatcttcctgggagaaatgtctatgcagactttttgccaattttttaatttgtccatttaaaaatcagggttttttttgttgttgagttgtaggagttctttttgtattccttatactagtcccttatcagatatatgctttgcagatattttctcccaggtgggttgtcttcacttccttggtagtgtcttttaatacacaaagttttaaatttttatgaagtcaaatgtatctacatttttctttggttgctcatgcttttggtgttgcatctaagaatccactgccaaatccaaggtcatgaagatttactcctatgttttcttctaagaattttatagtttttgctattacataaggtctttgagccattaagatctttgacttaacttttgtatatgatgtaaagtcactgtcaaacatcattcttttgcatttggctgtccaggtatcccagcattatttgttgaaatgcctacacttctttatattcccttgactcctctaaccaaggcagttggacctttgctactaccactgccctgaaactgctgtcactgggttactgaggactgggtagcttagttgagtagataatcttttgttgtttcctccttgtaatatacaagccttggcttctgtgacatcatactctcctagatttccccctgtcactgtggcttcttctcagtctctgtccatccctggtgctcctgaaggttctgttctcagccttacacacattacctgggtgatctcattctctgccatgacttcacttgccatatatgtgctgattttccccaaattcctatttctcccgacctttacatctattttatttgcaggtcatatatctaataaggaattgatatccagtgtacatgtagaactcctgtaattcaatacagaaaccaaacagtccaattaataaatggagaagagatttgaatgaacatttttctaaagaacatctcaagctcaagatttcccagataacttttctttcttcaaaatctgcttctgtgtttcctcatctgtaggtggcacagcatacatctgatttcccaagccagaaacctcatagttattcttgactccaggaagaaatattattgagtttttaaaaactcagcttattgactcattgttttatataataaaatgcaacagttttaagtgtatatttcaatgagttttaatacatttatgtacttgtgtcactatcctcatagatagagacaaaacatttctatcacaccggcaatttcctatgtgtcccatcccaatcaatcctttcccctttgctggctccaaacaatgactctttcctatctttttagaaagattagaattgcttttctagagttccagtaatggaatcatacagtgtctaagtctgtttgtggtgctgtaacaaaatacctgagactgggtaatttataaattataggaatttatttctcacagttctggatgctgaaaagtttatgatcaaggcactagcaggtttggtgtctgagggcccagtttctaatttgaagatggtgctttaaacactgtcctcacatggtagaaggggcagatgggcaaaaaaaaaaaaaaaaaaaaaagggcaaatgctgtgtgtagcccctctcataaagggcttaagctcattcaccagggaagagctctcatgacctaatcacctccaaagaccccacctcttaatactattgcattgcagattaagtttcaacatgaattttggagggatacaaatattcacaccatagaatatagtaatatagtatagtatatattttttgtgtctgtctgcttttgctcagtgtaatgtttttgaggttcatctatgttgttgcatgtattagtaggttgtatctattggtgcatagttattccattgtatgtatgtaccacactcttcatttacctgctgatggatattgcattgtttccagttttgggttatatgaataaactgctgttaac

SEQ ID NO: 43 - DNA, 4481 bp, Homo sapiens
tttttttttttttttttttttttttttttggttaaacagcagtttatcataatacccaaaactggaaacaatgcaatatccatcagcaggtaaatgaagagtgtggtacatacatacaatggaataactatgcaccaatagatacaacctactaatacatgcaacaacatagatgaacctcaaaaacattacactgagcaaaagcagacagacacaaaaaatatatactatactatattactatattctatggtgtgaatatttgtatccctccaaaattcatgttgaaacttaatctgcaatgcaatagtattaagaggtggggtctttggaggtgattaggtcatgagagctcttccctggtgaatgagcttaagccctttatgagaggggctacacacagcatttgcccttttttttttttttttttttttgcccatctgccccttctaccatgtgaggacagtgtttaaagcaccatcttcaaattagaaactgggccctcagacaccaaacctgctagtgccttgatcataaacttttcagcatccagaactgtgagaaataaattcctataatttataaattacccagtctcaggtattttgttacagcaccacaaacagacttagacactgtatgattccattactggaactctagaaaagcaattctaatctttctaaaaagataggaaagagtcattgtttggagccagcaaaggggaaaggattgattgggatgggacacataggaaattgccggtgtgatagaaatgttttgtctctatctatgaggatagtgacacaagtacataaatgtattaaaactcattgaaatatacacttaaaactgttgcattttattatataaaacaatgagtcaataagctgagtttttaaaaactcaataatatttcttcctggagtcaagaataactatgaggtttctggcttgggaaatcagatgtatgctgtgccacctacagatgaggaaacacagaagcagattttgaagaaagaaaagttatctgggaaatcttgagcttgagatgttctttagaaaaatgttcattcaaatctcttctccatttattaattggactgtttggtttctgtattgaattacaggagttctacatgtacactggatatcaattccttattagatatatgacctgcaaataaaatagatgtaaaggtcgggagaaataggaatttggggaaaatcagcacatatatggcaagtgaagtcatggcagagaatgagatcacccaggtaatgtgtgtaaggctgagaacagaaccttcaggagcaccagggatggacagagactgagaagaagccacagtgacagggggaaatctaggagagtatgatgtcacagaagccaaggcttgtatattacaaggaggaaacaacaaaagattatctactcaactaagctacccagtcctcagtaacccagtgacagcagtttcagggcagtggtagtagcaaaggtccaactgccttggttagaggagtcaagggaatataaagaagtgtaggcatttcaacaaataatgctgggatacctggacagccaaatgcaaaagaatgatgtttgacagtgactttacatcatatacaaaagttaagtcaaagatcttaatggctcaaagaccttatgtaatagcaaaaactataaaattcttagaagaaaacataggagtaaatcttcatgaccttggatttggcagtggattcttagatgcaacaccaaaagcatgagcaaccaaagaaaaatgtagatacatttgacttcataaaaatttaaaactttgtgtattaaaagacactaccaaggaagtgaagacaacccacctgggagaaaatatctgcaaagcatatatctgataagggactagtataaggaatacaaaaagaactcctacaactcaacaacaaaaaaaaccctgatttttaaatggacaattaaaaaattggcaaaaagtctgcatagacatttctcccaggaagatctacaaatagccaataagcatatgaaaaggtacaacatcattagtcatcaggaaaatgcatgtgttcatgtactggaagacttaatagtgggaagatgtcaatactacccaaagcactctacagattcaatgcagtatctatcagactcctaatggcacaattccagaaatagaaaaatccatctaaaatgcatatggaatcataattgactcaacagccaaaataatcttgaaaaagaaaaagttggaggtctcacacttctgaatttcaaaaactacaaaactatggtaatcaaaaaaccgtgagcctggcactcaactcctgcacaacaaaggaccaaaaaagcaagtagttaaccacatgtcaggtagagcaccaaagacagaacactattcaacagggaacttctgaggcacaaagggagcagtaaataaagcagccagcatgtcttggactggctcagaagcaggaggggaatcccatttctgggaaaagaaaagtcaaagaactgcagtggtccacattcgcagcacagatgctggcacccacaggggatgccgtcagccttcacaggccctgagtccagtatacggagctgcctggaatccatgcaaatgcgttcttccagaaagggaattccactggatcctactcacatcccaagaaacatgctgctgtggcacagcaccattttaagaggctagcccccaccagattatatcctgcccacttggggtccaataagcccctgcagtccacatccctggacccccaagaacatcctcccacatccatccagaaggttgcagtatcacaatcacccagcagtgcagccaggtccccagtactctgacccatgaagtgtcttatatcccagggaacaggcagtatagcacaccagggaggctaccccaggaaaaagggagctgaagctcccagaacctgggagccatcttcccaacaccaatgccaccaacagaaccttgcccctctcagcagggcaacagcatgcctgtgtgcaccttcagggggcctgaggaccagtatgtccatatgtgccatccaagaacctaaagacaggcctgctccacccactgtcaccagtgttctccagcgctatctttccctcatgccactactggtgcctatatgctctgtaggggggcctgacgactggcccaccccatccaacaccactggtgcccacgcacacaatcccaaggcctgaacaggcctgccccacctaccaccagtgcccacccaagtgcatcacctagggggctagaaactgtcccattcatcctgccacagctactgccaacagctatgattgccacctgacagtccagtgtctagcccactgctgctactgccactgccagcaccataaatgctgcctgggggcttgaggaccagcccacctgggccccccactaccagcacttacaccagctggggtcctgaggactagcatgcccagcccatcgccaccacagctaaagcctgcccatgccaccaaaaggcccagggactggcccctctggcatccctttccccagaaaagcctcacaacagcctcagctaacaatggcaacttaagccactgaggactcacagtgacatggttacatgacaccagttacattggttacagctgaagaaatcattgagcctacactcctgtgctcaccagaatcaaagccaaaacatcctaatcacaaccaaaactacagatatgcctacaaaaaagtctttccttatgaaagccaatccataaaattggaagaagcaactcttccactagctgaatagatatcaatgtaaggacacaagaaacatgaaaaagcaaggaaatttgatacctccaaagagacacaataattctccagtaacagattcaaaagaaaaggaaatctataaaaatgccagaaaaggaattcaaaataatgatcttagggaaactcagcaagttgcaagagaacacagataatacaaagtaggaaaacaattcatgatctgaataagacagtcagtagagatagatatagaaaaataaccaaacaaatcctggaactgaaaaattcaatgaataaaatttaaaaatgcaactgagagcttcaaaagtacgctagataaagcaaaactaagattttctgaacttgaagacaggtcttttgaaataacccagtcagaccaaataaattctcggtgtttcaggaaagagaagggaagaggcacagaaaacctatttagcaaaataacagtcaaacatttcttaagtcttgcaagagatacagacatccagatacaggatgttcagtaatcccaaaaaagattcaaaccaaaaaggtcttctgcaaggcacattacaatcaaattgtcaaaagtcaaacacagagagaattctaaaaacagcaaaggaaagcatcaagtcaccttataagagaatttccggt

SEQ ID NO: 44 - DNA, 3653 bp, Homo sapiens
accttggacttttggttctggtttccaactggtaggctgggggacatatggactaaacccaccccttaactaaaaagccaaaccttggctgtaattaacacacaattaaaataacttaccagttttaccttaaagtaataaatgctaagagtaattgaaactactggaattagatttatatgcaaggtgtgtaagaacagtaaaatgtgtttttagtaaaatgttgtaagaaggcatggaaatgtaaacttttgcctagggttaagggattgtttgagttaaattagaaagcagctgaaggttcaaagaagtggtggaagaattgtggaaatcaatttgcagaagaggttctgtgtctgaagatactgactaaattcaaaaaagggtatattatgggttttctataaattaagcattgcaataaaagcataacaaggttttcctaaggcactaatctgctctttggcaaaatttctaaagggttataaaaggtttttgcttctttaaaattctgagtcatcatcttggcaaaataattagtttatggtaatttggaaatctgtttcttaatatcaagtgttttaaaccttgaacatatttgacagccttcccaacgtcaaatttcagtttcaaaattgtctcccctggtgcctggctttttgaatacttcagacggcctctgaagtgtcccgaaaagagaggtaacaggatcatttgacatgtttaggtacatgggattgccaaaatgatgttcaatcttttaggttatatttttgtgaataatacaaatatatgttccataacatggaatttctaaaattctaatgtctaatatatgttatcaatcataattaaggttgttatgttattgtaaaccatgaagataatcaaacttatttatcaattgtgtttctaacagtaactaccctggacattttgctattcacagacaattgtcttgtttaattcttttcaaaagatggtttataatgagctataggaccctgacaggtgctctcaaatacaatttctgattatatttgagatagtcaattttctaataactttagagattgtaacattggaataaaggaaaatgtacaggactcataaagagctgaaatgttcatgaatatcaaacaaaacaagagttaactaaatggactgagctcagaaagctgaagcaacctttttgacattttgcttggaatattgctgatccatgtttggtttttcagactcagggaaactaattttgaactacttacagtctttaatattaagtaaggtatacactcctgtgatcaagatttagaacatgttttttctctctgcctggttcctctaaaatttagaacctatctgtgagtattttaaattatggcaatatagctgtttgcagcagtgcaaaaagaatccatttttctcttgcaacaggacacaattgaaaaagctggtaattttaccaaggctttgactggaagggtatgcttctctttaaggagtcaatctcgacttgcagagccaataaaagcccagtggggatactggcctcataccctcacctacacagtgccttacagggttactgacctgtggtcagtaaagaatgtcactttctaacaggcctaggagctccaagtttgtcttgggaccttaagaggagaggatcacctgactcacaggtatttgaggatacaaaccagtggttgggcttggctttaaagggcttatctgtgattccttgtggaacacacttccatcaaagccaatccaaatgacctatgtagaaataattattcttgctgcactttatgcaaataatcaggccaagtataagactaaattctatttaaacaactcagttctaagatcatttgttcttaacaaaaatgaggactcgcaagagagaaattatatcccaaacttatacatttgccattaaattctaaacctactaagtgcaaagtttttgcttacattttagactaactctgcttgttcctgtaaccctaccagcaatctccggctgcagctcagaaagaacaagagggatgggtaatgcaaaaatctggatcaatatcttgggttctgagcaattatcctgcaaatcctaccaggtgatgggaataaataggatgtccatcacttggaggtttcattttgggaaaagtaaaaccaacggagctaaccaaagtcaagcaccatgcacccaaatcctagcaaacatagctatagctacctgttatcaagacatcctttcctcttgcttgttggaggaggactcaattccacagtttcaccttagcatttggcttataataaggagtccatgcaaccccccatatcaaagacaaatttttgtcccagactgaattccaagctttgggtcaaagcctaggaaagaaactggattctgagggatccagaggcaggtaataatggaagttaaaggcacagcacaggtgagcatgactgattcctgccaattaagccaaacccaagcttcctgtttcatggataaaggccacattaatatccaaggcataaatgaggtttagggaatgccaaggctactgacagtaggtggaaaagaggcacaggtgaaagcaaataattcctattctctaggcacccctgcttcatgggtgaaagccgctttggtactcatggtggcacctgccaaggtcgccgaccttgtggatgcaaggacagaagagggaaagacaatgctcttcctctctccctcacgtaccctggttatcttctaagaagataagggaaccagtgatgcctgatcccctcttctagaatgggtagccattcatcttcagtctgtacccccttttgaatgcatcctgaaaccctgggactcattttaaaaatgcattcctttttcctttctcctccttagttctctctgcacaaataggtaattgcatctccatactgtgagacacttccctcagatgcatcctccaaactggagttaatttcccaaaccttaaattggttggttttggattgggctcaggggaaaggaacccagaaacctgacatgccagcaaaagggtaaagtgcaaccagttgggcttttggcctccctctcactgtgaaaactggtaaaatgccttggagtttttagctgtccttcccccaactttgtttcattttcatacatgttttctaataacctggttgtcttttctctccttcaggccatcagactccaagcggtcattcaactggagcctctgacaatggccccttctgccaggaacccttagataggtctctgagggagcgctgactgccgattcccccaaacagcattcccctgtcagtcggaagtatttaagaatcggtcttcatccttatcgttaatctaatagcagttagatgtacttctttagaggggggaatgacatcaaggtgggagggggtccctggagaaactccaaccagcctgcccactagggtggagcattgggaagttcacgatgtttgcagcagggaggagcctggcccctgctcttccattgtggaaactgagatttgaatggccaggtgggaaatgctctggcagggactctggccttgtaagagtccctgtttgcccctttcttcctttcacccaataaaacccgctttat

SEQ ID NO: 45 - DNA, 279 bp, Homo sapiens
tggccggcgcggtggctcacgcctgtaatcccagcactttgggaggctgaggcgggcggatcagttgaggtcaggagttcgagacaagcctggctaacacagtaaaaaccccgtctgtactgaaaatacaaaaaattagccgggtgtggtggcaggtgcctgtagtcccagctacttgggaggctgaggcaggagaatggtgtgaacccaggaggcggagcttgcagtgagccaagatcgcgccactgcactcccggctggcgacgagcggactccatc

SEQ ID NO: 46 - DNA, 8356 bp, Homo sapiens
tttttttttttttttttttttttttgagaagggtctcactctgtcacccaggctggcgtgcagtgtgcaatcccagctcactgcagccttgacctcctgggctcaggtgatcctcttacctcagtctccctcatagctgtgactacaggtatgcaccaccacacccgtctgatttctgtattttttttagagatggggtttcgccatgttgcccaggctggtttccaacacctgggctcaagtgatccaccatctcggcctcccagagtgctgggattccaggtgggagccactgtgcatggccctggtcatcatttctttgtgttctcttcttccttttacctaatgagagataggggaagaggaccccaggattactcaggaaatagcacaaccagcctgggttatgtacttttatttgagagagatttatgtagtgattattatatgtcagatactgttccagcagattctgaatactaacccatttatgaccatcacaaccccattaggcaggtactgttatttccattttatagatgaggcaaccaaggcacaccactagtgcatgacagcactagggtgcatgcagacaatctggctcagaatccatgctgttagctactaagcctgcctgacctcagagctttgctctttaaatttttccagaaatctttactgaaatccccggtgatctgcctaaactaatgaacgtacagagatctggtgccagtgggagcacagagactttgctgtctgggaagtggtccctggaagggccttcaggatggaacaatagagcaacagaatgactcccagaggaaattcccaagtttcacacaacttgggagcagagggaggaaggcggggagggtgagtctgtggctggaagatgcagtccatatgggattacatgaagacatctgtatatatgtgtttggaggtctgtgtacatgtggttctggttgggtgtccctgtgtgtgaaagtgttcatgcatttatgttttaatacccaccatatgcatgtgcgtgtgtgtgtgtgtgcatgtatgtgtttgtatatacatccatgggcttgttaatatacatgaaaggtgcaagaatagcctccttgtaaagtgacttggtttctgtcttagtgaattcaaattcacatccaggaattctaaaatcaacaatttttatttttcctgaaagggccattatttgcttagaagtccataggatgagcaatacatttggcattcttctcttatcttagtgaagctgaggcccagttggagacgaacacagagtcccctggtatgcaggctctctgagccagagcccattcctgtgggcagccaggacctgtccctggggctcatagacattagccatccagctgtcaaatagagatatggaaggaccttccaggttccatttttccaaacctttaaatcttaagatcccatccaaggccagccctgctgaccccagcaacactgtttattcaagggcttttcagggagccactgcctacactgacagggacaaggaggcacagcataattgctatctgttgctgctgctgctgctgcagttttagcacaaactgtgagcacgtctgtgggcatttgtctgtctgcagagaggtcagtccagacttctctcaccggaaggcgatggctggagtgctattcctaaggaagcaaagaacgaggggtggagagagtcgtccccggaattgcatggcttggggcttggtccagattgcgtggcgaggagggtaagcaggcccagcagagggcgccaccgcgctggctctcttctcccgcgcagtgcaggcaacggggcggtgttcaggaaggccaaggaaggatagattctcgatactgtacccccaccccacccgcctctgcctccctccttctcctatctcttctctcctccctgccccctccctcccttcccacctctctctcagtctttctttctttccatctctagcccctcacccccctccccaacttgagcaggtcaccccagggaacctcaagtctagtaactgagtgttaattatgtctgagtggattctggagaaaaagaaaaccatatactgtatcagcagagaaatggtttcactgtgaggaaactaatgatgcttttatcaggaacaatataaagattgcttttttactagtgtgtgtcccatagggttcagggctatgagatatttctgtatctggctttaggttcctctgagcttttacataatcaaatcaatagagccatgattcaccctctggcaacaactgctccctgcaagtttgctgttgcatctttagtggcgaaagagaaaataaataaatatatggaaaggaacttattatgaatctgtaaaaacattgatttgtttcgtcttcagtcttcctttttaattgctttgcatacacatgtacacacacactgtgagggtctaggttcacagccggtcagagaatgaggtggctgacgattgcccaggtatttgccattgtctgatgggaagagatgggttctgttgagcagaatcagaggtggagatgtgctgcttgcctgtcctcccgtgtctttttcagacattttattcatcttctctcccatccctgtgaattccctacattccaggcatgattttggttcttccctttctcttgagttatattgtttttatcagaaatttccctcccctctgcctggcagaaatgatcacccttggacctacatctgtccccagcagcatcagtgaggccgcagacttctcaccctccccagcccccattctaagaacagctggttaggacctcagtgagaatacaatatgggagtgggcaggagcagagagagcagatctcaccatttactctggagacacatctttccttctcatttctcctatccccaaacctccgagttcacggaaagagagcaccaggaataactcctaaagtctttcaggacacaggcagtttgccactcctttccctcctttctttaagtaaataagcaaaggcatctttcaggctaaaacatgggggaggattcagtgttgtgctactgtgtcatctacttttcacaggcaatttagatgaccagggcctcaaaacacaggtgtttcagtgtcacttgctgctttgcattgacaaagtcaaccgataaaataggtatgttcagctgggcttggagaaataaaaacagggactcactggcagtccagctggtcacagagacagggaaaggttgttttgtattttctactccagtccccaacttagaggccttgttcatagataggcttcattcttcccatccttcagaagcagaagaacattagaagtaataacagagacgaggcaggaaagaaaagccacttatgtaatcaggtgtgctgggacctggggatgacagtgtcacaaaataaaatggctccctaatgatgacagagtcttattaccaaagccatgctcctgtgacagtgctgccaggctcctctgagaggacagcaatgacagaattctttaaggacctactttgggtaaatatttgtccctaaagaacatcatctttgaggaccctcaatcctataatctgggagtcccaggcatttggacagatgggatccagcttgggtttcaggaaagaaagggactttcatacagcgctggggactgtgataccagcaacacagtgtattagcatacaaacaattgcaatggtggccatttattgaatatctaccttgtaccaaagactatgccgggagctttgtgcagactattgcattaagttaactttcaccctcaagacagtatagcaaagaaaggcttattattcccataattgggacttgagactcaaaaagattacataatttgctcaaggccacggaattggtacaagattgagcggggttccaactaagtctcttgagcctcacatctccggtcttcctgccatgccagcatcatagaaagtgttgaaaacatgctaagttaaccttgaatggatcctggacaactttatttaaaaattattaattatgtactttaaaaacgtattcaaaatcttattgttaccacattaaaccatggatattattcttagaaaaaggctattctttggcttaaaaaagggaatcgctataaatcaagtaagtaaatatattgagatgatagggaggatggatacagtaaaaattatgaaggagatgaacagatgactggaggttgggggatgccacagccggctgtgctgccttgaagggcagtgagaatgttgttagtagctgcctagaatgttgtgtagagaaggagtctgaggccccatgcattgtctgttagtgacgtctgccatggcgcacggggaagcactggaggttgctgggggtaacagcaaattgtgaggtctcctcgctctcttgaatcaagcccaacatgctcctttttcagaggaggaggaagcccagagaaatgaactgaacttttcaaatgtctcaaggcaatgattctacaaccagttgcctctttctaagaggcccaaacatttactcgtggttcccagtcaatatattttgtcttttggggagtggggatcatggtttttaataatttcacccagtttagattctttccagtagaaaggcagacctggattagaatcctgccttattccacgtgtgctacaggaagtaaccgtgtcccttttaacctctgaagtttcttcctctgtgtagtggagtacgtcaccatcacagtgctgttgtgagggttgaatgaaataaaccacctagagcattgattatgaaatgcaaagtcgaagttcaagaaatggtgcctaatgttgtctctttccttgtctacaaaatggatacttgttacaagcctaccaggtgcctcaacctttaaccagtagggttttcactaccatgaaacaaggggcaattccatgttcgacacatgctcgggaggctctgctgactctcccaggccttcatggccatcatcgttgggcatgcagcccaccaccctcccagcacagacacacagatcccgaccacacactcccaaccagaaatatccaaaaatacactaagaaaaatccaataatacttacttgaggttcttaaactctttctttgggggtagatagatacaaggcagtaaaccagcatagggaaagaaaaatagcaaaaaacaaacaaaccaaaaaaacacctaataaaaaaatcccataggaaggaaatggaacccccccccacccaccccaaaatggatctaaactgtgtggttgccggagctgctttcctgaaaagagggccagaaactgagagcatggagcgcttagactggaattgttttctaaacagaattttttagggtacatttttcacatatattaccctttctcaaaatgccctggccaaaagtagtaaaaatgctgtactattaaacttaagttaggggcctgtgttggctgagggacccagctgggtttcttctggcaaccggagaaagaaggaggcgggaaagtgccactgcgccctattaccctcaggtgccatttggtgccaactgggggatgtttgattgaacttggccctagctaagaacagtggggtgggagtgggggaaaagtaagagacagtttaaaaaataatgaagggacataggtatgttgagaagaaaaaaagaaagaaaaatcacatctgcatattttctgaatgagcaagagaggttatgattacagcttcattttgtgttccttgttaaaaagaggcagggcctcctaggacttggcagtgggtgcctagaggtatggtaagaagagggtggagaatggcccaagttttattcaaaacagtaggttttagctaaagccaagttgggcaaaagagacatgttcacaagtcatcaccagttgtggccaaagaaaggtcactttccatcttgtgattttccacggtccttggggaccaaattgaaagctttagggctttgactttgtcctcaggaaagtaaactcagcttgaagtacaagttcctggtggcacactgggtcacattgccacgacgaaagtccagcacacctgacttgctggaggatacctgaggaaaggtctgtggtcggagctgagtgggtttattgatcttactggaaaatgggcatttcagcttctctccaaggaaccagcccagacgtgtcagcaaagagtccctttggacacattgacccaagctgaaaaatgtatgaaaacacttcatgtctactaaatctggtactgctagctgcattgtctgatggtccatccaagaagaaagggagggactgggaagagtgaccgcctctctctgcagtcctatgtctgcaccagagccgcctcacgggcctatgggcaggcaaggaagctgtcaaggacctaccaagccttggcacaaagatcgctgcagttgggaagaacctttagctcacagatgttttgcagcaatgaatggaacaaaaacaatgtctgttagtgccaccaggccttgcagttggaatctgagtttgggctgctagaacatgaccaaaggaaacaaatgtttgaccagacatctgagaacatgtgttttgttttgcttgtgtagatgcagactgctggcctgaggtgtctgcttttggctgagaggcaacatggaggcccgttgcagacatgcaccatgccaaatacaggcaaagccagcctaggggattgcactggtctctgtttaaatccctcagtaagatgggtttccccctgttctattccaagtctaaacttacagtggttgaagagacgggacaaaaaaacaggtgtggtttgaaccctctggatttgaactctttttttctctcctcttcctgacttggataccaaagaaagagcctcaactcaccactgcttggaccaccccacaatagccccactccttttctgaccaggacaagaaaggggctcctgagggaaagggtttctaatagatccatcctgggataccttggaggcactaaaaaaagaaaaagaaagaaagaaaccaattctgttctggtgatgtttatgtgggctttttaagaatgtccaggctcccgtccagtggtggctgctgtttctcggtggcagagatgatgcctggtttattcttagtaaagtgcttaggacgctgagcctgaggggctctggaatggaaaaacaaaacaaaacaaaacaaaccggaggcccgctctgcctggctcctagagacacgcaaagctgggcaaaggaaggagattgaggtgggactgagacattgttgcattgtgaatgccccggttccccacctcctgccccccgaatcatgattgttttatgcggttatttttccctttggtgaggaaaatgggatgtggtgtcaattactgggaaaaatatacaaagtcctaatggctaatctattcttctaagtatgtggaaggctactacaccgaagagacttgatctaattgtataataaaactcaaatcatttccagccagatcggacatgccagggctgctgctgctgccgccgccgctgccctgggcaagagagaggtgagctgaccctggaaattgcttgtgggtaaaatcagcagaggatctgaaggcagtcgggaatacggctgcggggagcaatgagggaccataaagatgttgtactgtaaatagtatcttcttgttttatgtgtctccgtggtggcagttgttttctcggctagaacgtctatgtcaagagcctaaccttggagaaaaatccacaatactgctccatgatgttctctcccttcttccctggactcgtcgtttataggttgtcatttaaaaaactcacagcgccaagcgttttcacataatttgtctcatttaatttcatcctcccgacaaccctcccaggaaaatccaattatcattttacagatgaaaaatctaagggaggctaagttgtccaaagtttcatggctaaaagatgatggtgccaggactcaaactcaggctttctaactcatgttggccttttctgctcttccacagctgtcccagtttggggccagcaggccccctttgcaaagccctgttaagtgattttggtgtcagggcatggtggagacctgaggcttgggagcaaggtgtgtgcagtgtggagctggtggaaacacatttcctaaaattagctttctcctttcaactctttctgatctgatctaaaaacatgaaaggctcacaaccacccgcttgcatgtaaatccaatgacagcttctaaggccaccacaaaggcaaagcctctgtttatttaagcttgggat

SEQ ID NO: 47 - DNA, 7427 bp, Homo sapiens
tttttttttttttttttttttttgtattttagtagagacggggtttcaccatgttagccaggatagtctcgatctcatgaccccgtgatccgcccgcctcggccccccaaagtgctgggattacaggcatgagccaccgcgcccagccagttgttctattttacactctcacaagaaatagacacgacttctagtttccccacatatttgccaatattagtattatcattttaaatggtagtctttccagtttcgatgcattttggttgcatttccccttatctaataacactgagcatcttttcacattcctataagccacttgtgtctcttgttttgtgaaatacctgttcaagattcttataactatttagtggatctcaggagtactctgtgcgttttgaacacgcaatttttttctcatacatttatcacagtctatggcttaaaattatattttcttacattttgcagttttattaggatacatttttaattaatatctacaatttatcaatttttactcttatgatagtgctttctctgttcagaaatatttttcctattataatagctcgcagatattgtttaattttttcttttaaaagctttctgaattttgctttttcattttatgcctacattaaaaatattggactagttttgtgtatacaaaggacgatgcatgtatttttttaatatgagaatgcatttatttcaaaagcctttgttaaagacttactttccccactgaattatctacatgcccttataaacatttaatttactgcataggtggaggtctaattttgaacccttctttatccttattatttttgtgttatgatgctttgatactgcagctttcttagatgtctgaaaattggctctatttttttctcaaaattctaggtcctgtgaattttccaaacaaattttggaaacagcttgtgaatttctctcaaaatgtttgccacaatttactacagagttgtagtaaatagatatagaattcattgtagttaataaattacaaactatagattgcattgatgcttttttttttttttttttttgagacagaatctcaccttgtcacccaggttggagtgcagtggcacaatcttggctcactgcaacctcagcctcccagattcaagcaattatcctgcctcagcctcctgagtagctgggactacaggcccgtgccaccatgcgtggctaatttttttgtatttttttttagtagagacagggttttatcatgttagccagtatagtcttgatctcctgaccttgtgatccgcccaccttggcctcccaaagtgctgggattacaggcatgagcaaccgcgcccagccgctactgcattgattctaaagattaacttccagagaattcacatcaatgttgcatcttcaaatctatgaacatggtagatctttacatttatttaagtcttctgtaatgtttctctacaagaaattttaaaaagttttagtgtgaaagatttttaaaggtttcacttaaattattcttaactatttttataccattaaaattttacttttaaatgtattctcaattgtttatttctagtatttagaaattccattaattttccatattgtattttgtgtattgaccttgcattctacacattctgcaccattattgaatttgattcttattattcacagctttttaaataaatatattaggattttcttcatatacaatatacgttctgtgaataaaaatattttttcttttcacttttcaatttttatgcttttcatttcttaaccccatgcaagtccgaaatccagaggggcagccaaatcttaaagctccaaaatgatctcctttgactccatgtctcacatcctgatcatgcagatgcaagaggtgggttcccatggtattgggcagctctgcccctgtggctttgcgggatatagcctgccttctggctgcttttgtgggctggtgttgagtgtctgtggctttcccaggcacatggtgttgttggtggatctaacattctgaggtctggaggatggtggccctcttcccacaggtccaccaggcggtgccccagtagggactctgtgtgggggctcccacccaacatttcccttcctcactgccctagcagaggttatcaatgagggccccatctctgcagcaaacttttgcatggcatccaggtgtttccatatatcttctgaaatctaagcagatgttcccaaacctcaattcttgatttctgtgcatccacaggctcaacaccacgtggaagctgccaaggcttggggcttccaccctatgaagcaacagctcaagctatactttggtcccttttagtcacagctggagtggctgggatgcagggcaccaacaccctacactgcacacagcatggggaccctgggcccagcaaaaccattttattctaggcctctgagactgtgatgggaagggctgctgtgaagacttctgacatgcccaggagacattttcaccattgtcttggggattgacattcagttcctcgttacttatgcaaatttctgcagccagcttaactttctcctcagaaaacgggtttttctcttctatcacattgtcaggctgcaaattttctgaacttttatgctctgcttgccttataaaatgaatgcctttaaaagcacccaagtcacttcttcaacgctttgctgtttagaaatttcttctgtcagatactctaattcttctgtcaagttctaagtttcactaatctttagggcacgggcaaaatgctgccagtctctttgctaaaacataacaagagtcaactttgctctagtttctaacaagttcctcaactccatctgagaccacatcagcctggatctcattgttcacatcattatcagcgttttggtcaaagccattcaaaacgtctctaggaagttccaaactttcctgcattttcctgtcttctgctgagcccttcaaactgttccaacccctgcctgttacgcagttccaaaattgcttctgcattttcaggtatcttttcagcagcatcccactctactgataccagtttactgtattagtctgttttaatgctgctgataaagacatacccaagactgggcaattgacaaaagaaaaaaggtttaattggacttacagtttcatgtagctggggaagcctcacaatcatggtggaaggcaaagaggagcaagtcgtatcttacatggatggcagcaggcaaagagagcttgtgcaggaaaactcccccttataataaccatcagacctcatgagacttactcactatcaggaaaacagcacaggaaaagcctacctccatgattcaattacctcccaccaggttcctcccacaacgtatgggaattcaagatgagatttgggtggggacacagccaaaccacatcaatgaagctctctgttgtatatgttaatgctgataatgtttttttgttttgtttttgagatagagaaggagatcttagagacaaaaaaggggaagctccattaaaattggtaaaggaagaaacataatatgaaaggagggaaataatgaggtaaaagatgcagagactgctttccagacaaagtaagaatgaacttcactttggaataacaaagcagtgcttgcttggcaaggtgagtcttagaatctgactaacatcaacagggcagagtctcaggtaattaacaaaaccaggaaggaacagggagcagcaatgctaaaacacaagaaaccaggttactttgtcctacttcatagttgttattttcctaatcattggagataagctatgattaacagaaaaactacccatgtaaaatattgtcacccaacttttaagaaaaacaagaaagaagatacaaaacttagcaaacagaataagtaatttcagagaatcagaattaagaaaagaaacaaatgtaattacagtaagtgtaattcatatcttcagagacatgcaagaagaggttacattttagaaaatactgataatagctcttggattaaaaactcaacagatgttctgaagagaacaatagacatagttaaatatagatctagcaagtttgaagtttaaaagttgaataattttctctgaacccaatggctaggaaaaaatgaagaaaggtaaagggaggtaaagtgaagataaagaattgttgacgtaaagttgtttaaaatgctagaaaaaaaggaaagtaaacataaagatggaaataattaaagaactaatttaaatattttttagaactagaaatactgtagatttgagatttaaagttttcatagaagtatgaacttatattaatggagaaattctactgacagacatctcttgaagaagcaatgggatactaatgattaggacagaatcataaagacttccagagtaggaggatagaaaggtaattttcaatggaataagaagtagatagaaaatttattcttaaacatgtagatgttgttaataactgggacaagaccatcaatgtctgaagaaataaatgtttttacaaatagtgtcctataagtacccaaatacgcatttaattttgtggacaaagcaaagacaattgtgcatatctcccaattcccaagcatttaaaaatccaaaaataaaataataaaattaacaaacagatttttagaattatatctggcaggagtttggatcagtcatagagcgcaatagcatacttgaaaataaggacaatatggccattttaatgatattgattcttcctatccatgagcatagaatgttttttcatttgtttcatcctctctgatatctttggtgtttttagttcttacagagatctttcacctcactagttagttgtattcctaggtatttgattctttttgcagcaattgtgaatcagattgcattcctgatttggctctccgcttgactcttgttggtgtatgggaatgcgagtaatttttgtatgttctttttgtatcctgagactctgccaaaggtgtttttcatcttaaggagctttcgggccttaagcttttgggcctataaagttttctacatataggatcatgtaatccacagacagggatagtttgacgtcctttcttcctatttgggtaccctttatttctttctcttgcctaactgttttggcaaggacttccaatactatgttgaacaggagtggtgagagagggcatccttgtcttgtgcacaaaatacactaaaataaaattgcttaaaactagtgataaagaaaaattctcaaagcggccaatgacaaaaacacagtttgcacagaggaacaaaaaatgccagcaaacattttattggaaacaaagaaaattagaagataatgaagcaacatctttaaagtactggaagataaacattgtcagctgggaattgtagactcagagaaactatctttcaagatgtaggtgaaataaagattttgttcaggcacttagaacctgaaagaaatcatcaccagtaaaacaacactataaaaaatgttaaagaaaatgtttcaggcagaagtaaaataatatcaaaaggaaatttggatctacatagaagaatgaaaagcactggaaatggtatcaacatggttaaatatataagatccttttatttctgtttgaattcaattgattgtttaaacaaggggtcagcaagctatagcttcatgggtggactgcctgtttatgtgaacaaatttttactgagacacattcatgctcatttgtttatgtattatcaatgggtgctatagaattacaaaagcagaattaagtagttgtaacagagcctaatggcacacaagcctaaaatatttagcttttaagcaaagcatgtccggttctggtggctcatgcctgtaatcccagcattttgggaggccgagatgggcggatcacgaggtcaggaaattaagaccatcctgggcaacatgatgaaaccccgtatctactaaaaatacaaacattagctgggtgtggtggcatgtggctgtaatcccagctacccgggaggctgaggcaggacaatcgcttgaacccgggaggcagaggttgcagtgagccgagatggcaccactgcactgcagcctggtacaaagctagactctgtctcaaaaaaaaaaaaaaaaaaagagagagaagaaaacattattaacctctaatttaaacaagaataataacaatttacaatgagcttacaacatatataaaaataaattaatgacaataacagaacaacagttaggataaaataatgaaaatgttgttacttcatgatactgtatgtaaagtagtatattataatttgaaggtagaatgtgatgagttaaacatgtatactacaaactcaaaagcaaccattaaaattaacaatatagagagttttaattctcaagtaaaaaaaggagataagatgaaaccataaaatatatttaattcatagaaaagaaggcaaacaagagggaaaataagcaaaaaacagatgggatggtaggggaagcaaaattttattaccatcttcttagtttttttttttcctctgctaagcctgagaattaaattgatataagacagatcaacaggaaaatgcatacaaatttatttaatgcatgtattatgtggcatgcaagattctttaaggaaggaagactccatgacataatcacttatgttctgaagtagacacagagtagtaaattgtgaaatatgacaagacaaaggagctggaactagtgtagttaattgggtgaagaggtgattaacaggataagggttggtttaacaaggtctgtttgtacaggtttcccttgcctcaacttctcatcctgggtgatgagactgttactttccttcttgtataaagagggcaactttcatgtagaaattttacctcctacttttaagaaaaaggaaaatcagagtgctttaaaggaaaatcagagtgcttttcttgcatctgctatttttcaagtgtctttaactcaaaaaaatcaatatgccaaagtggcatgtttgggggtatctggttctgaattccttcaggaaagatagaaagcaaaagcaaaataataggtttaaaactaaaaatatccaggtgcggtggctcacgcctataatcccagcactttgggagactgaggtgggcagatcatgaggtcaggagttcgagaccagcctggccaacatagtgaaaccctgtctctactaaaaatacaaaaaattagccaggcatggtggcgggcacctgtaatgccagctactcagaaggctgaggcaggagaatggcttgaacccaggaggcagaggttgcagtgagccaagatcatcgcattgcactccagcctgggcaacagagccagactctgtct

SEQ ID NO: 48 - DNA, 2476 bp, Homo sapiens
tgatgttatttttcttgaggaacatgatgtaacccattgtctacaaaaaatccaaaaattagccaggtgagggggcacctgtagtcccatcttctcaggaggctgaggtgggaagactacttgagccaaggtggtggaggttggagtgagcccagattacaccacttgcactccagcctgggcaacagagtgaggccttgtctcaaaaaaaaaaaaaaaaaaaaaaacaacgatttttatgaaagttggagaaccaggattaagactgggtgggaactaagaatgacaggtacttttaacaatacagctgggatgctgttgatgacatgaatgaaccccactcttactgtagtcatttgctcaagattcaaagtcatgaaaaagagtagaatggaccaaacttaggtactaagagtccccagcctggcagtgaaaacagtatagttcctttgactttaatatggggaaacaggttcctggattgacgatctcaccaaaactatacacaattttttttattttttctcagacctttcagggatgaatatatacaatttctgagaaagaaacctgagtacctttaggaagggaaaaggaatgctgaatatccccaaataacatgtcttacatgtttggtaagacttactgtaccctgtcctagaagatagaagatgccctgcccttagaagacaaagagactgtagagctatgccttctaaatcttaagccactcttcagataatggatcccttcatggtcagcccaaacatctcaagaacttttaatttgtaccgtttgtctttttttccatttatttaataccacaaattcactttattattatgaagccaatatctacatcttctcacaaagattctcttaagaaatgcagaactggccgggtgcagtggctcattcctgtaatcccagcactttgggaggccgaggcgggtggatcacctgaggtcgggagttcaagaccagcctgacaaacatggagaaaccctgtctctactaaaaatacaaaatcagctaggcgtggtggcacatgcctgtaatcccagctactagggaggctgaggcagaagaatcccttgaacctgggaggcggaggttgcggtgagccgagatcgcaccattgcactccagcctgggcaacaagagcgaaactccgtctcaggaaaaaaaaaaaaagcagaactccttactggcctcaaaacatactgtgacatttccgtaacctacaggtctagaaatcctgtgccaaatatggttaacttgtttgctgagaaggatgtggaagaactggaaccctcatacacagctgatgggaaaacagtctggaactttcttaaaacattctggtaaatgggggcccggcaagctagaaagtgtggctataatcccttgcttttttccttttttaaactttttctctctcagtcctgacctaaagatgaccctagtcaggctggacacggtggctcacgcctgtcatcccagcactttgggaggccaagacgggtggatcacctgaagtcaggagttcaagaccagcctgaccaacatggagaaaccctgtctctactaaaaacacaaaattagctgggcgtggtggtgcatgcctataattccagctactcgggaggctgaggcaggagaatcgcttgaacctgggaggtggaggttgcagtgagccgagatcgcgccattgcactccagcctggacagcaagagcaaaactccgtctcaaaaaacaaaaacaaaaacaaacaaaaaaattcccctgagagaaaacctgtctttccagccagaggagcaggaaaaaatgaccctatggtctgaagaatgtggaaataatccatctttttttctctctctgctttctgcctgaggggcgttccttttggcaaaatgagcaggcagtgtaggcaggtaatcatcagagagaaagcccatctttctaagccagaggatgaggaaaaggggccccctgggtgccagggagtctggggggaaatcctgaagagcaaagacctgaaaagaggattctctaattctgtacatgagctgaattccgtgctcagcccagagctgcacatacaagagacagagcccaggcaacacagccacactctgaactgacactcggaccaccaccaccaaacagaaggcaacgcaggacctgcagactaaggctaacgaggctgattgcctgacaaaacagaaaaaaaagaaacattcttcagggaattttagcagaacacagagtctcccaacataaaacagacagtcctcactgcacagcagttcagaactgtaaaaatgaccttccaacctgaaactgccatgtgctgttcataatcattaatgggtaaaattgtgatttttttcctgtcttttgaaaattgtcaaaaattgataatcttgtactgttaaatgtataggaaacaataaagaaatatttgtgtacact

SEQ ID NO: 49 - DNA, 3023 bp, Homo sapiens
aagcagtggtatcaacgcagagtattttttttttttttttttttttttgagattgagtctcactctgtcacccaggctggagtacagtggcatgatcttggctcactgcaacctccacctccctcccaaacaactcttatgcctcagcctcctgagtagctaggattacaggtgtgtaccaccacactcagctaaacatttttttttttttttgagacggagtctcactctgtcgccaggctggagtgcagtggctcgatcttggctcactgcagcctccgcccccctgaggcaggagaatggcgtgaacctgggaggcagagcttgcagtgagccaggattgtgccactgcaccccagcctgggtgacagagcaagactccatctcaaaaaaggaaacttttatcaatagtagtcaaaatgggagcaaaaatgcagaactggagtttaaaaattagtttccaacagttgtcagtgaaatatttatcactattatgtaggaaagtgtgtcaggtggaatgcagagtccagtatgaaaaggagcctgtttcagaacggaaactgtcaggtggagtggactccctgcaatggagtgatggaaagatttggtacaaccattgatgacctgagaacagacactaggaaggtttgacaagatccttcctacccccactccactggtgatgtgtcaccaagttctgctaactaaatgggtggcctcaagcaaatcccttacctccttttagccttagtttcccctttaaattggtgatggattagatcagtggtggtcagccattttcttaaagcaactgaactgtatcttaatcagaaacttaactagtaaaacaattaaaatgcaagtctgttgcttcaagcaacaccactgtggctccatggagcactaatttgaaaaccacagagatgagatcatttctaagaaaacctttcaactttgtttccatgatgctacttgccacaatcttttttacttaagcaatgataccgtttctggctgaacactcaccacacagctattaatattggaaactgaggcaagataccaagagatttttgcacttgaattcctcagggttctcttacagccctgaaaacacctcttcaaggaaataaataacatctgcaaatggtgcagctgcccctaagtattcaaggcaaagaagccttagtttgcagagatgatgataaacttttcatccttccacagaaaatgagaaagccacaggaaatacacggttattttctaattaaagttcaatgtgtacgcttttaaattctgaagttatccttcttttatgatatcaaaatagccctcttttttgaaatgatggtagatcataccttttggtctttttcattgtccttacataaaagttggtaatcatatgtcagtcccagaagttttatttgacacttactggtctataaaatccaaaggaatggggatcactgcctgccttaaaggtttttttgtgtgtttgtttgtttgtttgtttgcatgtgaaggatttttatgtcacaaatccagctaacagtggatctaggatctaggcctcaccgaggatgtcactgaacctgtcagccccaatgacaggcacacaccttcaaagagcaagagtgcccatcactttctaggctccttgcctgctgctcattccatcatcacggatacagacttgtttctggtttcatcttccaccagagattgcaaagcatcctctgcccagtgcttctaggaggccttactgggatggttcataagccactttcctcttggtgacagcccctgtacactgtggcatgtacggctggctccacttggtatttgttgcaggagggaagaacatctcacttttgcttggctaaagggccaccccaggagagctattttgcctcagggtcttgcagggtttctctaggaaaacagtgcatctgatagttactctctgcccctaggaggaaagacagattcgcccttccttcccaagtcccaggctgtgtggttcccagccccaagggtagcaagtcagaacctccggagaggcttttaagcatgcacatgtccagggtcctcatcaagagactgaatcagggggtctagggctcagcacaggcaccctttttgtttttgcagtttcacaggaattctgatgtgccagtgattgtcaggtttgtccctgggcaggacccacctgcctgaccttctgtccccctgggacacagtatttccagagaggtgcttcagttgccccaccacgacttccagcgccccccatctctgtatgcagctgagctcatgatggagcccactgtgtgctttttgttgttgttacattcctataaaaatgtccacgcatatttgaacatctgtgttcatagtggcattattcacaatggctacaacacgaagaaagcattccaagtacctatcgatgaataagcaaaatattacacacacaggaatattattcagccttgaaaggaaattcggacacgtgctacaacatagatgaatcttgaggacggtatgcaaagtgaaataaatcagacacagaaggacaaatactgtatgattccacttatataaagtacctagattagtcagattcatagagacaaagtagaatggtggttgctagacgctggagggaggggagaaaggggagttattaatgggtgtagagtttctgttacacaggatgcaaagtggcctgaagatggatggtcgtgatggttgcacagcaatgtgaatttaatgacactgaagtgtacacttaaaagtcattaaaatgctaaattttgtatgtgttttacaattttaaaaatggaaaaaaagtaagaccaaaagcaacacctctccagaatgtgtgttatataccaaattttgacgtatgtgagattgctgactatattttacttatcaatttgaaattatattgtttttatgttgacactccatataagccattattttgaaaaaaacattttccttattaaaagatt

SEQ ID NO: 50 - DNA, 2989 bp, Homo sapiens
tttttttttttttttttttttttttgttccaatctttaataagaaaatgttttttcaaaataatggcttatatggagtgtcaacataaaaacaatataatttcaaattgataagtaaaatatagtcagcaatctcacatacgtcaaaatttggtatataacacacattctggagaggtgttgcttttggtcttacttttttccatttttaaaattgtaaaacacatacaaaatttagcattttaatgacttttaagtgtacacttcagtgtcattaaattcacattgctgtgcaaccatcacgaccatccatcttcaggccactttgcatcctgtgtaacagaaactctacacccattaataactcccctttctcccctccctccagcgtctagcaaccaccattctactttgtctctatgaatctgactaatctaggtactttatataagtggaatcatacagtatttgtccttctgtgtctgatttatttcactttgcataccgtcctcaagattcatctatgttgtagcacgtgtccgaatttcctttcaaggctgaataatattcctgtgtgtgtaatattttgcttattcatcgataggtacttggaatgctttcttcgtgttgtagccattgtgaataatgccactatgaacacagatgttcaaatatgcgtggacatttttataggaatgtaacaacaacaaaaagcacacagtgggctccatcatgagctcagctgcatacagagatggggggcgctggaagtcgtggtggggcaactgaagcacctctctggaaatactgtgtcccagggggacagaaggtcaggcaggtgggtcctgcccagggacaaacctgacaatcactggcacatcagaattcctgtgaaactgcaaaaacaaaaagggtgcctgtgctgagccctagaccccctgattcagtctcttgatgaggaccctggacatgtgcatgcttaaaagcctctccggaggttctgacttgctaccctaggggctgggaaccacacagcctgggacttgggaaggaagggcgaatctgtctttcctcctaggggcagagagtaactatcagatgcactgttttcctagagaaaccctgcaagaccctgaggcaaaatagctctcctggggtggccctttagccaagcaaaagtgagatgttcttccctcctgcaacaaataccaagtggagccagccgtacatgccacagtgtacaggggctgtcaccaagaggaaagtggcttatgaaccatcccagtaaggcctcctagaagcactgggcagaggatgctttgcaatctctggtggaagatgaaaccagaaacaagtctgtatccgtgatgatggaatgagcagcaggcaaggagcctagaaagtgatgggcactcttgctctttgaaggtgtgtgcctgtcattggggctgacaggttcagtgacatcctcggtgaggcctagatcctagatccactgttagctggatttgtgacataaaaatccttcacatgcaaacaaacaaacaaacaaacacacaaaaaaacctttaaggcaggcagtgatccccattcctttggattttatagaccagtaagtgtcaaataaaacttctgggactgacatgattaccaacttttatgtaaggacaatgaaaaagaccaaaaggtatgatctaccatcatttcaaaaaagagggctattttgatatcataaaagaaggataacttcagaatttaaaagcgtacacattgaactttaattagaaaataaccgtgtatttcctgtggctttctcattttctgtggaaggatgaaaagtttatcatcatctctgcaaactaaggcttctttgccttgaatacttaggggcagctgcaccatttgcagatgttatttatttccttgaagaggtgttttcagggctgtaagagaaccctgaggaattcaagtgcaaaaatctcttggtatcttgcctcagtttccaatattaatagctgtgtggtgagtgttcagccagaaacggtatcattgcttaagtaaaaaagattgtggcaagtagcatcatggaaacaaagttgaaaggttttcttagaaatgatctcatctctgtggttttcaaattagtgctccatggagccacagtggtgttgcttgaagcaacagacttgcattttaattgttttactagttaagtttctgattaagatacagttcagttgctttaagaaaatggctgaccaccactgatctaatccatcaccaatttaaaggggaaactaaggctaaaaggaggtaagggatttgcttgaggccacccatttagttagcagaacttggtgacacatcaccagtggagtgggggtaggaaggatcttgtcaaaccttcctagtgtctgttctcaggtcatcaatggttgtaccaaatctttccatcactccattgcagggagtccactccacctgacagtttccgttctgaaacaggctccttttcatactggactctgcattccacctgacacactttcctacataatagtgataaatatttcactgacaactgttggaaactaatttttaaactccagttctgcatttttgctcccattttgactactattgataaaagtttccttttttgagatggagtcttgctctgtcacccaggctggggtgcagtggcacaatcctggctcactgcaagctccgcctcccaggttcacgccattctcctgcctcagggggcggaggctgcagtgagccaagatcgagccactgcactccagcctggcgacagagtgagactccgtctcaaaaaaaaaaaaaatgtttagctgagtgtggtggtacacacctgtaatcccagctactcaggaggctgaggcataagagttgtttgggagggaggtggaggttgcagtgagccagatcatgcacgctccagctgggtgacagagtgagactcaatc

SEQ ID NO: 51 - DNA, 1043 bp, Homo sapiens
acacgcggacggttctgtgcgccgcaatggctgcccgcgagtatcggagaggcggagctctcagtcttttacaggaccgggtctcctgatgccgccggtggttcctcgaggcccccttccacgcatccgccgccgctgcttcatcaggacttcatttcggtgacgcagagctttggcgagagctacggcaacagcaagaactgccggcggctcttgtgctgcagggtgaggaccgcgccgggcggaccgaggcccggggtcgctgcgcccgccgccctcccagcctgcggctccgagcggggcctgggcgggcagactcgactccccccgacgccgccctctccacccttaccccgcaaaaaggggcaaatctgctttccgggccggggcagccgtggtcggcacgcctgcagcggtctcagcggcccaaattctgcggggcggtggtggtgggaggaagggttggagccccagcaggttgtctgggcttcgtttgattttcggcaaggtcctggcccaggccccagtccctcttggagcggaagcctctggacctgttgctcctaagaaggcaagcggcccctgacgcgttgctgtggcctggtttgaccctcgtagccagcccatgttctgtgaggcatgaagcgccacgcagacaccacgacaaagtgagatgaactaagacctcttcttgattctaagcagggaacgcacagctcaccctgtcacatgcagcgatcataagctgagaattaccctcttccttcccacagcgtctaatctttttttatgtttttgtggcaaggtctcgcttagtcgcccaggctggagcgcagtggcgatcatggcccactgcggcctcgacctcctgggctccagcgtgcgtctaatctagaaccaaatcctccttccttagatcatcccccaaatcacccaactacaggtgaaatcctgtaatagtttcctccgaacaccctgttgctgagacacctcaacgtctcaacctggtgtgtttgtacgatagagtaaaagaccccacttgt

SEQ ID NO: 52 - DNA, 2333 bp, Homo sapiens
ttttttttttttttttttactattcttctttttactcttctgcttcttgtttaatgagccatttctgtggatagtatgattacaatgagccatttgtgtggatggtatgattataatacttacaaaaatgtcagtgttattcatagaatgacaacagatttaatgcattttttcttttttttattctaaagttagtcaatgtgaagaatctgacctcaaagacaattcttgataattcattggggaggactagaaacaccaccctctaactttataacgtgtcattggtcactcagcaaagcggccaggcatgctggtttatccagctttcagcccttgaagattcaccagactaaggattaagtgaaaaagaatatctgccacctacttcactgaggcgtaaacagtccctatagatcaatgagaaaaggacccaacacccgtataaaacaaagggcaattcacatgttttccagaaatggaacgcagatgattttatgaagatagcccatttgatgtcgtttttcaactaagagattggcaataatcagaaagtttgtagggctcttaggaaacagatctgagacatcatgtaagtcctgggcatttgcgaaacttctatggggaatggactgacagtgtccttaaacaattaaacatgcacatccgtggtcggccccctcaagggtggagaggatgaggcatttgtgatgtctcaatacatcctggagaatctagaaggtcacctccacacacctgcaccacaggtggcatcctataggtatttgctaaaggaagcaatgaaagggtaagataaataaccaagaggtgcccgccactgtgttcacccaattttacatactccaagttatcactagtgtcaaaatcagaagaaataactccaatgccagaaaaagccagctggctgtgcccttcaatatcctgagaatgatgggatgtgaaaaggtgtcgaatcctcaacagcagggagactgcttggatgactcccacccagaactgaaattgaaggcggagtttctgagcttagaaaggggaaagacccagcatttatgactgactccttcatccaacctctttccccaaatcagacgatttttgacatgggtatggtaacaccatacgtttgcatagagagattcatgggaagcctagctgctgtgacgtgcagcagtcagtttttaacaccatcatcagtggcgaaatgaaacattcccttgaaatcgcctttctctggatgactatttaaacagcttcacgttagcctgcctgtgcgactgaggacgtactgatgatatcctcattttccggtggaggaaagtttatgacgtcaatcccattccgaatatcaggactttaaatctctatgatgttagcacaaaatgcaagtggagccctctccaagctttcatagagccatgtattttggaagccttaatggggagacagttctcaatgtggaaaagttgtcatgtatcgcagagaagagaacagaccaccatgcccagctaatatttgtatttttagtagagacggggtttcaacatgttggccaggatggtctcgatctgttgacctcgtgatctgctcacctcgacctaccaaaatgctgggatttcaggcgtgagccaccgcgctgggcccaatacatctcttttcttagttgacttcttttgtatctcttcatagccttttcatatttttatattgatttgtatctttcattttttatatatttaaactacctacttatgttaattctgtgccatggtaacttccttaattcatgattcatatgggcatacatacagtcatggatacaacaggctttcgtatataaaattatgaaaaagtttattcttttaacattttgtggggatacaacaggttttcatatataaatcatgaaaaaatgcatctattcttctaacactttgtgaggatacaacaggttttcatatataaaattatgaaaaaaaattcttctaacacctttgtggggatacaaaaggttttcatatataaaatcatgaaaaaggccgagtgcggtggctcacgcctgtaatcccagcactttgggaggccgaggcggctggatcaagaggtcaggagatcgagaccatcctggccaacatggtgaaaccctgtctctactagaaatacaaaaaattagctgggcatggtggcacgcacttgtgatcccagctactcgggaggctgaggcaggagaagttgcttgaacccgggaggtggaggttgcagtgagccaagatcgcgccactgcactccagcctggccacagagcaagagtccat

SEQ ID NO: 53 - DNA, 2339 bp, Homo sapiens
ttttttttttttttttttttttttttggatggactcttgctctgtggccaggctggagtgcagtggcgcgatcttggctcactgcaacctccacctcccgggttcaagcaattctcctgcctcagcctcccgagtagctgggattacaagtgcgtgccaccatgcccagctaattttttgtattttagtagagacagggtttcaccatgttggccaggatggtctcgatctcctgacctcttgatccagccgcctcggcctcccaaagtgctgggattacaggcgtgagccaccgcactcggcctttttcatgattttatatatgaaaaccttttgtatccccacaaaggtgttagaagaattttttttcataattttatatatgaaaacctgttgtatcctcacaaagtgttagaagaatagatgcattttttcatgatttatatatgaaaacctgttgtatccccacaaaatgttaaaagaataaactttttcataattttatatacgaaagcctgttgtatccatgactgtatgtatgcccatatgaatcatgaattaaggaagttaccatggcacagaattaacataagtaggtagtttaaatatataaaaaatgaaagatacaaatcaatataaaaatatgaaaaggctatgaagagatacaaaagaagtcaactaagaaaagagatgtattgggcccagcgcggtggctcacgcctgaaatcccagcattttggtaggtcgaggtgagcagatcacgaggtcaacagatcgagaccatcctggccaacatgttgaaaccccgtctctactaaaaatacaaatattagctgggcatggtggtctgttctcttctctgcgatacatgacaacttttccacattgagaactgtctccccattaaggcttccaaaatacatggctctatgaaagcttggagagggctccacttgcattttgtgctaacatcatagagatttaaagtcctgatattcggaatgggattgacgtcataaactttcctccaccggaaaatgaggatatcatcagtacgtcctcagtcgcacaggcaggctaacgtgaagctgtttaaatagtcatccagagaaaggcgatttcaagggaatgtttcatttcgccactgatgatggtgttaaaaactgactgctgcacgtcacagcagctaggcttcccatgaatctctctatgcaaacgtatggtgttaccatacccatgtcaaaaatcgtctgatttggggaaagaggttggatgaaggagtcagtcataaatgctgggtctttcccctttctaagctcagaaactccgccttcaatttcagttctgggtgggagtcatccaagcagtctccctgctgttgaggattcgacaccttttcacatcccatcattctcaggatattgaagggcacagccagctggctttttctggcattggagttatttcttctgattttgacactagtgataacttggagtatgtaaaattgggtgaacacagtggcgggcacctcttggttatttatcttaccctttcattgcttcctttagcaaatacctataggatgccacctgtggtgcaggtgtgtggaggtgaccttctagattctccaggatgtattgagacatcacaaatgcctcatcctctccacccttgagggggccgaccacggatgtgcatgtttaattgtttaaggacactgtcagtccattccccatagaagtttcgcaaatgcccaggacttacatgatgtctcagatctgtttcctaagagccctacaaactttctgattattgccaatctcttagttgaaaaacgacatcaaatgggctatcttcataaaatcatctgcgttccatttctggaaaacatgtgaattgccctttgtttttatacgggtgttgggtccttttctcattgatctatagggactgtttacgcctcagtgaagtaggtggcagatattctttttcacttaatccttagtctggtgaatcttcaagggctgaaagctggataaaccagcatgcctggccgctttgctgagtgaccaatgacacgttataaagttagagggtggtgtttctagtcctccccaatgaattatcaagaattgtctttgaggtcagattcttcacattgactaactttagaataaaaaaaagaaaaaatgcattaaatctgttgtcattctatgaataacactgacatttttgtaagtattataatcataccatccacacaaatggctcattgtaatcatactatccacagaaatggctcattaaacaagaagcagaagagtaaaaagaagaat

SEQ ID NO: 54 - DNA, 3972 bp, Homo sapiens
taacctctgaaataccttcaggatcattctcccattgttctgctgaatggcctctgcttgttttatcatgttaatttccttatctcttggccacacccctgttttcctctcttgaaaatgctctttcattcttgacctcctagccaggctgagaatccttcaaatctccaagttctgtttcccttttaattataaagtctgcatttaaatcatttctttcttctcacattgtattatatgcaattaagagaaaccacacagcatcctgaatgctttgctgaatttcttgctcatcagtcttaagttctgccttatataaagtcttaggacatggacacaattcagccaaattctttgccacttggtaaaaaggatggcctttccttcagtgtccaataagttgttcctcatttccatctgagacctcatcagaaggaccttttctcttttttttttttttttttttgagatggcatttcacttttgttgcccaagagtgcaatgttggctggagtgcaatggcgtgatctcagctcactgcaacctccgcttcccaggttcaagcgatttttctgcctcagcctccagagtagctgtgattacaggtgcccaccaccatgcctggctaattttttgtatttttagtagagactgggtttcaccattgtaaaaagtaaagtagaggttcctcttcaaagactttcctccccatttaattaggaataaatagtaacttctcttagaagcaaaatttattcaaaggcctgtgctaacattcttaaataccggctagccatgataaggaaattagtgtactttatgttcttagctcccacaatttagcctaaatatttgacctggcatacttatactggtccaagcaagcattaggtcatagcctgctcctcttccttctttgaaggtgtttttacctttctcagcattccacaagttacttccgccttcctttgttctcctctacctttgcctcttttaaaaagttataagttgctagccagttggaacaaatacagaatatgaggtcccattccagccaatggaaaccggacacagcagtagggtggacgcgtaaggttataaatgaccctatctcctttgttcggtatactctgacaaaactgctggagcgtgtaccctttctgtaggaagtaaaaatggccttgctgagtaaattaaatttatgttcaagtgctatttccttatggcactagggaacaagcatttcaaacaaccatgttggtcaagctggtctggaactcctgaccacccaccttggtcttccaaagtgctggggttacaggcatgagccaccacgcccagcctctttactcttttctaccagcattgtgatcaccaccacttaagtaatctctaacaagttccagacttcctttacaactctccttttctgagccttcatcagaattgcccttaacattacatttatggcaatgtatactttttctagcctgctcttccaaattctttccgcctctacttattacctagttcccgagccactgccaaattctcaggtatttgttaaagaagcaaccccacttctaagtaccagttttctgtcttagtcttttctgtgctgttataacagaataccacagcctggataatttataatgaagaggaatttattggctcacaattctggaggctgggaagttcaagactgagaggctggcatctggtgagagactttgtactgtgttatcacatggcaaaaggcagaagagcaaagagaaggtgagagagagtggaaaagagagctgaactatttttttttttttttaataagaaacccactcctgagataaactcattcccatgataagggcattaatccattcataagggcagagccttcatggcctaatcacctcttaaaggtccctcctcttaaacctgttgcatcagggattaactttccaatgcctgaacttccagggacacattcaaaccatagccgaccttgactgatggaacactatctagctctctttaaccttatcttcaactcctcccctgggctcaggctgcatgcatcagcagttatttgggataaggcacaacactgatacttctagtaaaaggatagatgagaatttcccattatggaagtggttttctttaaatttttcatctgcctttcattgtttagtcatggcttcattggacatgatgaggtgaatccattctcattctcatctcatctgagagatgtgtgcccttaggctcacataggtgatgctgtgtagaagatgccaggcagtggaaaggagggggcttttcaaagcagacccaacagagtacaaaacacataactcaccaggaagtgactcctgccattaagaatggaatcaggacccttctatggtggcttttggttgcaaagtccatgacaaacagagttgtgcctagctaggttgggccatagtcagagggataaaattcagtcttggtcaagaagtacttaatgttaggcattttgtacaccgtaacagcaaagcatccttctctttctaaaaatgtatttataaagaatttgctgaaaatgaacactttacagttgcagagacagaagctaagaacattctgcaaacagggtcaccacctccagcccagatagttcagactgatgtttttcaacatctttcctgtgttttgggcattttcccctccccacaaaagtttaatacagatatattacatatctgtttatgtactgcatgcatttctatactttactgataaagatagtttgattttttttttttgccctaaaaatctatttgttccctaaggagcaatgtttgcccccactgaagatgcatacttaacaagaaatagtagtggccgggcgtggtggctcatgctgtaatcctagcactttgggaggctgaggctggcagattgactgacaacacagtgaaaccccgtctctactaaaatacaaaaaagttagctgggcgtggtggcatgcgcctgtagtcccagctacttgggaggctgaggcaggagaatcgcttgaacctgggaggtggaggttgcagtgagctgagatcgcaccactgcactccagcctgggcgacagagcgagatttcatctccaaaaacaaacaaacaagaaatagtagcattgaatgggcagaaaaggaatttagaccagatagaaaggagatttatcttcattatcacactggctacagagtcttatatgttcctgagtaacacaatgcacaaaatgtccatatatctacacaagtagctaattattgtttgcatatatgtgtcgtgtatatgtttatattgttcaggggtaatatacaagccctatagtttaaactatgtgtagtttaattaatgaatggagtttaaattattcttaacatatttttctgtcattttttacataactcagaaataaaagcataggatcctctaaatattatgttatataagtgacttactgagtggacaaattctggtgctcattgtgagcaaaactggttaagcaatatgttttagggaaaaaagcctcattaaaatctgttttcccatcctaattataaaagcgacaatttctgttgaaaatatggatatagtagaaaagcataatgagaactaaaaaattgtctgtgatcctagcactgagagaaacatcacggtcaatgtcttggtgtctgcatacacaaacataatctggttatgttaagaaggcatataaagaactaaaagtcaaccagcctaagcaacatagcaagacccatctctacaaaaaacaaaagaatacctgggcatggtggcatgcacctgtggtcccagctgcatgggaggctaatgtagaaggatcatttgatcctaggagttggaggatgcagtgagcaacgatcatgccactgcactctagcctgggcaacagaggaagactatgtctct

SEQ ID NO: 55 - DNA, 4623 bp, Homo sapiens
tgataattttcttttcttttttttttttgctattgagtgtatgaatttcttatattttggatattaacctccaatcagatatatgacttgcaaatattttttctcattacctacgcttccattgatttcatttttttctttgctatggagaaacattagattgatgaagtctcagttgtatatttttccttttgttccctgtgcttctggtgccattaaaaaaaattactgccaagacaaatgtcataaagctttggccttattttcttctggtaattttatgctttcaaatcttacatttgaatctttgatctattttgagttgatttttgtatatgaggtgaataagggtccaatgtcattcatcagcatgtggatatctacttttgccaacagtatttattgaagagactgtcatatcccccttgtgttttcttggctttttttttagatcaaattaccataaactgttggatttatttctggtctctctcttttcttccattgatctatgtatctgtttttatatcagtaccatgctgttttgattactgttgctttgtaatataattagaaacagtttttaaatttttgttcaagattgctttggctattcagatcttttgtggttccatgtgaattttataatttcttttgctatttctgtgaaaatttcattggagttttgacagggattgcattgaatctgtagaccactttcagtaatatggattttttaacaatattaattcttccaatccatgaacatggtatatctttctatttgtttgagtcttcttcagtttctttcatcattgtcgtatagttttgggtgtagagatcttttacctccttggttaaatttattcgtagacattttattttttacaaccattgcaaatggggcagttttctggattacttcttcagatagttcatttttagtttataaaaatgcttacaattttttatgttgcttttgtgtcctgcaactttactcaattcattcattagttctaacagttattttggtggagtacttagggccttctatatataagacagtgctatctttaaataaatcatgctgctataaagacatatgcacacatgtgtttattgcagcactattcacaatagcaaagacttggaaccaacccaaatgtccaacaatgatagactggattgggaaaatgtggcacatatacaccatggaatactatgcagccataaaaaatgatgagttcatgtcctttgtagggacatggatgaagctggaaaccatcattctcagcaaactatcacaaggacaaaaaaccaaacaccacatgttctcacttataggtgggaattgaacaatgagaacacatggacacaggaaggggaatatcacacaccggggactgttgtagggttgggggagggggaagggatagcattaggagatatacctaatgctaaatgatgagttaaaaggtgcagcacaccaacatggcacatgtatacatatgtaacaaacctgcacattgtgcacatgtaccctaaaacttaaagtatattaataataaaataaaaacaaataaataaataaatagataatttactcctttcctattggatgctgtttatttctttttattttctatttgctctctaggacttccagtgctttaaatagaagtggcaagagtgggcattcttttcttcttctcaatctcagagataaaactttcagttttttacaattaagtatgatgttagctataggcttgtcatatatattttttaaaaagatttaaaaaaattaaattattttttaacatttttgtgggtacatggtgtatatattatggggtacatgagatgttttgataaaggcatgcaatgtgaaataagcatatcataaggggaaataggatatccatcacctcaaccatttattatttgaattacaaacaatccaattatgttcttttagttatttacaaatatataattaagttattatgactataatcaccctcttgtacagtcagatagtagatcttattcattctattttattggacccattaactctccccacctcctccccccctcagcctcccactacctttcccagcctctggtaaccatccttctactcttgatgtccattagttcaatttattggacttttagatcccacaaatgggtgagaacattcaacgtttgtctttctgtgccttatttcacctaaaataatgatctccagttccatctatgttgttgcaaatgatagaatctcactctttttattgcagactttattgtgtgtatgtagcacattttctctatcaattcatttgttgatggacacttaggttgcttccaaatgttacctattgtaaacagtgctgcaacaaacataggagtgcaggtatatccctgatatactgatttcctgtcttttgggtatatacccagcagtgggattgctggatcatatggtaactctatttttagttttttgaggaaccaccaaactgttcatagtggttgtactaatttacattttaaccaacagtatacaagggcttccttttctccacattttcaccagcatttgttactgcctgtctgttggatgtaagacattttaactggggtgagatggtatcttactgtactttttatttgcatttaccttatgatcgatgatgttgagcaccttttcatatgattgtcacttctatgtcttcttttgatcaatgtctattcagatcttttgctcactttttgattggatcatatttttttcttttgaattgtttgagctccctatatattctgcttattaatcccttgtcagaggggtagtttgcaaatatattctcctattctgtgcattgttgattgtattatttgctgtgcagaggttttttaactggatgtaatctcatttgtccatgtttgctttgattaccggtgcttgtggggtattactcagaaaatctttgcccagatcaatgtcctggagattttctccaatattttcttgtagtagtttcatagtttgaggtctcagattaaagtctttaatgcattttaatttgatttttgtatatggtggaagatagaggtttagtttcattcttttgcatatcgatatccagttttctcagcatcattaatctaagactttttcctcgtgtatgttcttggctcctttataaaaataagttaggaggctcacacttgtaatcccagcagtttggggggccaggcaaatggatctcttgaggtcaggagtttgagacaagcttggccaacatggtgaaaacctgtctctactaaaaatacagaatcagttgagcccaggaggtggaggttgcagtgagccaagattacaccactgtactccagcctgggcaacagagcaagactctatctcaaaaaaaaaaaagttcactctagataaatggattcatttataggttctctattctgttccattggtccgtctgactcctttttattccagtgccatgctgttttgcttactgtagctctgtagtataatttgaagtcaggtaatgtgattcctccagtcttgtcatttttgcttaggatagcttcggctattctaggtcttttgtggttccatataaattgtaggtctgatttttccatttctgtgaggaatgtaattggtattttgttggggattgcattgaatctatagattgctttgagtagtatggacattttaacaatattgatttttttctgatttataaacataaattcttttctattttttaatgttctcttcaattttcttcatcagtgtttttcagtttttgttatagagattttaaattctttagttaatttctaggtatttaattttatgtgtagctattgtatatgggattactttttaatttattttttacattgttcactgttgacatatagaaatgctactgattttgtacattgattttgtatcctataaatatactgaatttgtttatcagttttaatagtttcttggtgatatctataggtttttccaaatataagattatatcatcagcaaacaaggacaatttgacttcttcctttccaatttggattctcttcatatcttctcttgtctgattactctagctaggacttacagtacaatgttgaataatagtaatgacagtgggcatccttgtgttccagattttaaaggaaagtcttttagtttttccccattcagtatgatactcactgtggatctgttgtatataaattttattatattgaggtatgcttttatctatattcagtattttgagggttttaaaaatgatggatgtttaattttatcaaatgctttgtcagtatcaattgaaatgatatggcttttatccttcattttcttgatgtgatgtatcatgttgattgatgtgcaattgttgaaacattcttgctcccagaattaaatcccacttgatcataatgaataatcctgttaatatattgtagaacttagtttgctactattttgttgatgatttttgcattaatattgttgtattagtctgttctcacactgctaataaagacatacctgagattgggtaattt

SEQ ID NO: 56 - DNA, 1591 bp, Homo sapiens
tttttttttttttttttttttttttttccttcctagagctggaataaatatccatgttttatgggacttgagcttggctttgtcccttggttttgttaatgttaattcctcttaaatatctaaaaacatctctacctatttgagagggccatatgctacacaggcttcctaatactgcttagcaatccttctactggttcctaagtggtttactattgtgttccctggaagaggtattacaaacgttttattcttctcaagcctcttagaactgtcaaagttgactgtgcctcctatttcatagagaaaaaactaaattattagatatgaccattcccaaaacttcttcccatctaccttcaagacttacctcttttcagccatgcatcccccttttctaagacatgcttctctttgtgttcttgacctcattccttcccatctaagaccatattccaccctgtttaatttctagtcttcggtttctctttttactagtttctttcctccacctctacatagctgcaggtcttctctgtcttaaatcaacaataacaaaacaagacaaaaacctttccttaacttggcctcttcccttgaactattttttctctctccttcctataattgttatacttctttaaaaagtaattgttactttttgacaaaagtaaatattgtcccttttttccctactttcaagtcctctctgtcttgtgacattctggcctccatacctgcttaattttttttgagatggggtcttgctctgttgcccaggctggagtgcagtggcacaaacacagctcactgcaacctccacctcccgggatcaagcaatcctcccatctcaccctcccaagtagctggggctataggcacccgccaccatgcctaattttttgtgtttttggtagtgacagggtttcaccatgttgtccaggctggtctcgaactcctgagctcaagcatctgtccgactcagcctaccacagtgttgggattacaggcgtgagccaccgcacccagcccctacttgaatttttatgtcattattgactcttcaccactctctccttgagactcacttatccctttgctctctatttttcctgcttttgttattcttcatttttcttctcttgctctgaatcccttaaatgctgaggctgctcaagtttcatccctagtcctattttctcattctatatgcacactcatttttcatttaacagacttcactggcttcaggcaccatttgttttattattcatattttcaacccccatatctctctagtgctgtagacctttatttctacttactagttatattcacctaacatcccatagatatgccaatgtcaatgtgcctaaaacaaaattgtctctacctcccgctccttcaaatctattctgtcttctctaatcctataattactctccctcaagtcatcatcatcacttttctgggttactgtaatagccttcaggctaatttgctcactgtcaatcttgctgtctctcatttcagaatatgttctgcttgcaggtgacagtaaactagttaaacaaatatttaatattagctt

SEQ ID NO: 57 - DNA, 1593 bp, Homo sapiens
ttttttttttttttttttttttttgcttaagctaatattaaatattgtttaactagtttcctgtcacctgcaagcagaacatattctgaaatgagagacagcaagattgacagtgagcaaattagcctgaaggctattacagtaacccagaaaagtgatgatgatgacttgagggagagtaattataggattagagaagacagaatagatttgaaggagcgggaggtagagacaattttgttttaggcacattgacattggcatatctatgggatgttaggtgaatataactagtaagtagaaataaaggtctacagcactagagagatatgggggttgaaaatatgaataataaaacaaatggtgcctgaagccagtgaagtctgttaaatgaaaaatgagtgtgcatatagaatgagaaaataggactagggatgaaacttgagcagcctcagcatttaagggattcagagcaagagaagaaaaatgaagaataacaaaagcaggaaaaatagagagcaaagggataagtgagtctcaaggagagagtggtgaagagtcaataatgacataaaaattcaagtaggggctgggtgcggtggctcacgcctgtaatcccaacactgtggtaggctgagtcggacagatgcttgagctcaggagttcgagaccagcctggacaacatggtgaaaccctgtcactaccaaaaatacaaaaaattaggcatggtggcgggtgcctatagccccagctacttgggagggtgagatgggaggattgcttgatcctgggaggtggaggttgcagtgagctgtgtttgtgccactgcactccagcctgggcaacagagcaagaccccatctcaaaaaaaattaagcaggtatggaggccagaatgtcacaagacagagaggacttgaaagtagggaaaaaagggacaatatttacttttgtcaaaaagtaacaattactttttaaagaagtataacaattataggaaggagagagaaaaaatagttcaagggaagaggccaagttaaggaaaggtttttgtcttgttttgttattgttgatttaagacagagaagacctgcagctatgtagaggtggaggaaagaaactagtaaaaagagaaaccgaagactagaaattaaacagggtggaatatggtcttagatgggaaggaatgaggtcaagaacacaaagagaagcatgtcttagaaaagggggatgcatggctgaaaagaggtaagtcttgaaggtagatgggaagaagttttgggaatggtcatatctaataatttagttttttctctatgaaataggaggcacagtcaactttgacagttctaagaggcttgagaagaataaaacgtttgtaatacctcttccagggaacacaatagtaaaccacttaggaaccagtagaaggattgctaagcagtattaggaagcctgtgtagcatatggccctctcaaataggtagagatgtttttagatatttaagaggaattaacattaacaaaaccaagggacaaagccaagctcaagtcccataaaaacatggatattttattccagctctaggaatg

SEQ ID NO: 58 - DNA, 8212 bp, Homo sapiens
ttttttttttttttttttttttatgtggcctttatctctgttctttgttctcttcttatcccctcaaaatatagctgcaggtaaattgtaaactatgaagcactatatccaactagcaaagtatcattgtcatcatcactatcacatcctttgtaaatcaagaccaaccgcataaccctagatatttaaagaaattaccagaattatatctttgggaaatggtctctgtcagcccaaatctaatataataaatgcaagcacttgcccaggcaaattcctgaaaagaacacagtgccacagaaacagttcagaaagtcctgtgagtcttggtcaatgattatctcctgttgcagagttaacatgctttggcaactgacccggaggtgggagagcgagaaaagaagtgacaaaagcatcaagattcctcaagtagatacgtcctgaaatgagttggagtagactcagatgttgtgttcagaataaaagccaggagatttgactatctccataccagattattgctgtcttatttgaagaatcttattttgctatgaagggttgaaaacaaacattcctgcagagagctgttagtcctgacctttgctgagtacataatattctgggtgaactatgaacagaaatattgtactgtactttcttgtcttatagttagaaaagttttcaaataaaaattttgcacgtgtgatatgacagttgcaagtgagcatttgaggaaactagaactttattgcattggaggctattccagggagattacgtggtagtcactctacataggatggctttatttggtcaaaattctagtgaggtgtgaccttgcaaagatttttccagagtatttctggaggatgccgaacttgagtgaattgttaacatgtctaacagtattcctgtggtcactcctgaattggatttttaactatgttagctccagatgcgaagaaagtatataataatagaaaatgactgttctccatcttttaaacagaaaattttgttaataaaaatttcttcaggccatctcactacatggtccccgaagcactttctcctgagtaaaccaataggctctgactctttctcaacctcttatgataaaaactgttttgatgtactgttggattcagtttgccagtattttgttgaggatttttgtatcgatgttcataaaggatattggcctgaagttttcttcttttattgtgtctctgccaggttttaatatcaggatgatgctggcctcatagaatgagttagggaggagtccctcttcctcaatttttggaatagtttcagcaggaatggtaccagctcttctttgtacatctggtagaattcagctgtgtatctatctggttctgggttttttatgtttagtaagctatttattactgactcagtttcagagctcattattggtctgttcaagatttaatttctccctggttcagtcttgggagggtgtatgtgtccaggaatttatccatttcttctagattttctagtttatgtgcataaaggtgttcataatatactctgatggctatttgtatttctgtggggtcagtgttaatatcccccttgtttctgattgtgtttatttgaatcttctctcttttcttctttattaatctagctagtggtctgttttattaatttttttcagaaaactagctcctggatttgttgatctttgaatgctttttcatgcctcagtctccttcagttcagctctgattttgcttatttattgtcttttgctagctttgggattggtttactcttggttctctagttcttttagttgtgatgttagattattaaattgagatctttctaacttttttgatgtgggcatttagtgccataaatttccctcttaatactgccttagttgtgttccagagattctggcatgttatttctttgttctccttagtttcataggacttcttggtttctttctttttgtatggagtttcgcccttgtggcccaggctggagtgcagtggtgcaatctgagctcactgcaacctccatctccagggttcaagtgattcttttacctcagcctcctgagtagctgggattacaggcacccaccaccacacccagctaatttttgtatttgtagtagacagggtttcaccatgttggccaggctggtctcaaactcctgagctgaggtgatccacccaccttggcctcccaaagtgtggggattacaggcgtgagccaccacacccagccaggacttcttgatttctgccttaatttcattatttacccaaaagtcattcagaagcaggttattcagtatccatgtacttgtatggttttgagtgaaattgcattgtcttgatttctaatgtgattgtgctgtcttccaagagattgtttgtaatgatttcatttcttttgcctttgctgaggagtgttttactgctgattatgtgatcagttttcaaatatatgccatgcggcaataagaagaatgtacattctgtttcttggggatggagagtttggtagatgtctatcaggtccatttgatccagtgctgagtttgggtcctgaatatctgtgttaattttctgtcttgattatctgtctaatattgtcagtgggtgttagactcccacacaataatagtcggagactttatgtctctttgaaggtctctaagaacttgctttataaatctggatgctcttgtgtcacgtgcatttatatttaggatagttagatcttcttgttgaattgaacccccaccattatctaatgtgcttccttgtcttttttaatctttgctggtttaaagactgtgtctgaaactagaattgcaacacctgcttttttctgttttccatttgcttggtagatttttcttcatccctttattttgagcctatatatgtcattgcatgtgaggtgggactcttgaagacagcataccaatgggtcttggttctttatccagtttgctactctgtgtctcttaattgaggcatttaaatcatttacattcaaggttagtattaatatgtatggatttgatcctgtcatcatgctgttagctggttattttgcagacttgtttatatggttgctttgtagtgtcactggtctgtgtacttcagtgtgtttttgtagtgcctggtaatggtctttcctttccatatttagtgcttctttcagaagcttttgtaagacaggtcaggtggtaacaaatttcctaagtatttgcttgtctgaaaagtatcttatttctccttcacttatgaagcttagtttggctggttatgaaattctgggttggaatttcttttctataagtatgttgaatattggctcccaatctgttctggcttgtagggtttctgctgacaggtctgctgttagtctgatgagcatccctttgtaggtgacctgacctttctctttacctgcctttaatattttttctctcattttgaccttggagaatctgacaattatgtgtcttggggatgatcttcttgcaaagtaacttctggggttctctgaatttcctgaatttgaatgttggcctctctagctaggttagggaagttctcatggttgatatcatgaaaaatgttttccaagtcagttcaattctccccgtctctttcaggaacaccagtgagtcatagatttggtctctttatatagtctcatatttctcaagaggttttgttcattgattttcattactttttctccattcttctctgactctcttatttcagaaagccagtcttcaagctctgcagattctttccttgcttggtctattctgctattaatacttatgattccattatgaaattcttgtagagtgtttttaagctctatcaggttggttacattattttctatactggctattttgtctgttagttcctgcattgttttattatgatttttagcttccttagattggattttaatgtactcctgtagctcagtgatctttgttcctatccatattctgaattttatttctgttatttcagccatctcagcctggttcagcacccttgctggagaggtgatatcatcatttgaaagaaagaaggcactctggttttttgagttgtcagggttcttgcactaattctttcttatttttatgggcttatcttacttcggtctttgaggttgctgacctttggatgggttgattttatttgaacgggtatcctatttgatgaccttgattgttatcaaattgtgattgtgatataaggtggattcagctgactggcttcatttctggaagattttagggagtcagtgctcagctcccacctcctggcctgtgtgctctaactctggggaacttgtattggggccttgactttgttctctggctccttaaggttaaaaatccactgtgctggaggtggccaagttgctcccagactgctggtcactacacttcaatgggtggtgtcatccaaagcattttatagtgcagtgacagcaggctccatcctcattcacacatgtcagcagtaatggtagcagcagcagggtgcctgcctccctgtggtcattcaccacagtgatagaggtaatgcagctgttggggaagacggccagaggggcccctgctggtgactgtgtgcatggtcatgttggaggtggtgttgactcaggagcaggacactaatgggcacaggtctaggtgccttctttgtgctctgcaagcaggagtggttgctcagggtgggggaggatctgctgttctctgcacagtattagcacaagggtggggcactggaaggggtggggctggctggctctgtgcccaccaaggctccatctgcaatggtggtcagtagaatgaggtgaggcagactgcactctcatgtgctagcagggcaataaaagcaaaacccactcatgcaaacacacaccagcaaaacatttggggaattgccatgggccctaggggggaagccgcagtatggggagggagtatgtgggctggtatgtggcagtaggagccaccctgttggagctctctgccagtcaggcatggtctgccaccataaaaaccatggtgtgggcccccagggcacctgagactattctgtaagcaggtgtggccaggctgaggccccaggagaggccaccataccaagggttgctcaggtcacactggccccatctgatgggcaagattgccctgcagaattcaggaccgacagttcccctagggctaaagtctcctataggaacaagtcaagcctagtgggatagctgttcctgactgtgctctgctacagacacgcccacaccaaaccctccaggctccacttcagctggctgtccctaccacttctctaagcagctctctgccaattcaagtgtccatggtggttgagaggtctcttcctgccaaggttccagaggcccatggtgagagtgggttgctccttgtcagttcaactcattcgttcccctaaagccattgggaatcaggaacaagtccaagtgtgctgtatccccatgtagggtttccagctttctcccctttcagcccagcttctgtgtcttcccttcattcatagtgtcttccctttgaagatctgttaggagcatgctagtcgtctcagtcccttggtggaaatgattccacctgtctgtgtctagttggccatcttgccctccccctctactttcctttattttacctcaaagaaaactgaatttaacccaaagctgcttcatctctttgaatttatactgttcctttgagtatccttaaagtcccattataagcactaccttccataaagctttgcccagttcttctaacctcattgatctgcctctgctgctctgctctgaacttaatccctatttttaggcccttatccttaaccttgcagaagagtcgcttgtgttcctgtcttgggtccccctatgtttccacaggcagaaaactgcatgccttatccattcctccactccctatggtgcttagcttggcatcttcctaacacaggctagatgggctgtgtctgttgccgcatatgcacattgtgaagcaatatgtcatagacctccaagataactagtatcatctcttcattttaacatgagaaaactgagatgtacaaaggcactcaaaggtgcaaactcaaggtcattggtgagatggtggcagagctaggtcacgtgactccctgtaaattaccaccttctaaaatgtagagggaaatatgatgtcatgggagagtattttgtggtcatgaaatagtatggattgcctatatcctgatggaaataatacagcagaggggaaaatcgatgatgcaatgattgtaagagggaagttatcaagtaggtaaaagggggaaaaatccagtacacaaatagaggacttagaaactagcctggacaatttacctatagtgacaggatgggatactgagtgtgtgggcatagatgtaggtacactggtagatatcaagagcatgtggaggtttccttctgaacttttctatttttctattgaataagaagtatggtttacagataaaaatggtttatgggtaaaaatgaggaggaggcagaagacattgtaggtttgaagagagaagagataaaagtttttctaggagagtgggaaagggaattgatgagggaatcatagtatgatttcaggcagctgtgaccattaaggtttgtggtcaaacaatgtttttcagtggagatgctgtcagtgtttcaggcaggcatcttccttggcatttagcatccctggcccttggtagtacccctcaatcattgtgctgatcaaatgttctctgccccacttccaaacactgcccagggaactgaacctttcctggttgaggaccacagagagaccaatcacaaagttgcatagttttcttcagtcacattcagatgttggcagggactatgcaaaatctgggtttatgagtgttagggttagacagaaaaggacagtgaaaatagacagagtcaaaggaattgaaagtgtatgtaatgcagtaattataacagattttatgaacaacaaaatacctctgctggcctgaggcaactcaggacaccacagtgggaagggaattcctggctaccattgatgaacatttggacatgtgtccaattttgggctattattaataaagcttatatgaatattttacacatatctttgggtcgacatatgcatttatttctgttagtaatatacacagagaaatagagttctcttgggacttgcttgatcaaagggaatacgtatctttagctttatttaaaattgctgtatatttccttaaaaattacacatacacatactatgacttagccattccatttctggtatttacccaagagaaaataaagtgtatgtctgcacacacaaagacttgcaaattaatattcatagcagctttatttgtaacagcaaagaaccagaaacaacccaaatgttcaccagcaggtaaatggataaacaaattgatgtgtagccatacgacagaataacattcaataaaaacaaagcaaacaaaatgacttctgatacacacaacatgggtgaatctcaaaataattgttttgggtaaagaagctagacacaaagaatacatactatgtgatttcatgtatataaaattctagacaatacaagctaattcatagtgctagaaagcagatcagttgttggctgcgtgtagtgaggattgattagagagaaagggaagaattgcaaaaggcatgaggaaacttctgggaatgtggacatgttcattttttttggcatggtaatggattcatgggtatatacatatgttaaaataaaaatatcaaattgtacacattaagaatgtgcaattgggctgggcatggtggctcacgcctgtaatcccagcactttgggaggccgagacgggtggatcacaaggtcaggagatcaagaccatcctggctaacacggtgaaaccccatctctacgaaaaatacaaaaaaaaaaaaaattagccaggcatggtcgtgggcacctgtagtcccagctactcaggaggctgaggcaggagaatggcgtgaacctgggtgatggagcttgcagtgagctgagattgtgccactgcactccagctgggtaacagagtgagactctgtc

SEQ ID NO: 59 - DNA, 5575 bp, Homo sapiens
gggtgcctctcagggacccaggcgctcagcgctggggccggagggcgttcgcggggcgccggggaaggctagggccgcggggtccccggggcgccgtccccaaccgccgacgcctgccagaccaccaagtgggggccatgtcgacgtgtgaggagcctggtggaaggtgatactggaattccggcactgggcctgcaacccttttagtccacagttgtcagaatctaaagggaagaaaaacgaagtgctcagaaccctcacagaagccgggcacctcatcccgtgtgtgggttttttccccagtacaaacccattgtggggacaggcgcttttgaagaaaaaattcagattcccgggctgaagtggctcctcacagccttgaacctgacccccagcttcccgctaaagccgagcgtgcccagcacggcgaggtcagcagaggcccctcggagggcggccgggggaggtcagtgggaggccctcgggcagccggtggatgggccggcgacctccccgactccatcagaagcgctcagtctgtgcccttcagttactggagcagctcccgtcctttggccagttctctggaaggtcgtttccgtttctgtgtctgccacacgtgcagcacaatcgaaaaaccttgttcgacatttctagaaagagtagatgctactgaagacccaatagattgctgagggttttcagagcagggacaattgcatcagggtgctgggctccgggaagaactcagaggacttggctgacgggcggatgggacagtgattggtgccgagaatgggccagagaagcaggtctgcctggagcaggcacccgaggccgcgtgcaggggcggtcctgggccaccaacccctggaagctgggccaggagcttcggagccatccgaggcttttttcgctcctctcactctcatgcacctagttaccctccccacagagtcttctcacggcgcggttttcggctaccattgcagtggtgtctgactacacccagtgcctctatcgttcccccctcagtctgttctcgcttcttggcaaacctgtccttggaaagccctctgctgactcctgttaccctgatcaaatgcatcctcctcaggaggctcgtgagccctttgcagggtggcccaagaggcatcacgccctgctctccagccactcttggggtcccctacagggccaggcgtcccacaccagcagcgggtgctggtcctgccacagtctgtgcgacacgtgaatgaaggctgtagacctgtggtctgcgggaggcaaattccaactccagctgtcaaacataaggggactggtaggctctccagggtggattgtctcacggcatccagaggcagggaccgaggcagggacctagccaggcctcgggaaggagctgcaaacccaggagctctggggtgtggcttcatctccctccctccctaccaccctacccccatctctccgtgttcttcagatgcctcattttcctgtcaggcacctggccagctctaggagctggaatcaggttggtgcctccttggtcagtgtccacccctagtgtcatccacagtgaccaacggaaggggtggccggtggtacaggacattggccatcttgggaaagatcacagagacaggaagggcctctccagctaagcagatgagaggttcttcagtggtctggacacatttgcccactcatggccgtccccctgccctgttgagagaaccgatgaggaaagggagccctgcatctgtcgccttccgactccgaccgcctgaggctgggctgccggcaagccgcggcagcatatgacagcacttgaaagaaagtccctggaaagaatgtggatcattgcagaactccctcaagaaagcgccagaggaggaccccattcagcaccccgcagaactcctcaaactcctgcgtccacactcccccagcgtggtggctgcttctatctccccaggcttagctggcctgggtcttgaaggcctctcctcctgctgtccccacgcagcatcctctctgccactgcacagctggatgcagtgaaggccaggcggctgtggctgcttgggcaacaggagctgcttgaccctgttctgctggccttgttggcctcactcccgtagagagccaaggttacccacgtctctgaagctaaggctttctttctaggcctgggggagtcacatcttgcattcgtactcactgagctccacgtctatggttagagaatttatcaacattttataatgctttatcaattccatcatttgagggccctctggcaaggaacctgttagtacatggagtgcctggaatgttccagaaagctaacatgaacagctggcccttgctgtccttatacattgaggactccaaaggccactcaggatgacaggaaatgcaggctccaaaagattcggttcctttgtgaggccctcgggcagtggtcagacacgaaggaaataggaaatcacccccaaaccacacctctccctatgaggccacagctgccgatgcagccttgggagggggatggagggagagaggagggcatctgaatgtggacacaccctgctgtgagggctgtgggcggtcctgagactggagccagcccccaggctcagctcagctcggggacctcgtgcccgggctttcctggggaggaaggtgttggatctcctgcctctctgtattcattcacactttgggtttctctctcttccgcgcattctaacatctgcaggattttttttttttttttttttttttgagacagagtctcgctctgttgcccaggctggagtggagtggtgcgatctcagctcgctgcaagctccgcctcctgggttcacgccattctcgtgcctcagcctccagagtaactgggaccacaggcgcccgccacgacgcccagctaattttttgtatttttagtagagacggggtttcaccgtgttagccaggatggtctcgatctcctgaccttgtgatccgcccgcctcggcctcccaaagtgctgggattacaggcgtgagccaccgggcctggcacatctgcaggatttatggatgaagggccacaaacccacatttggtctcattcaacagatgttgtgtcggcagggcgaggtgggactctgtctctgcccacgctacctgcccctggggttgtagttctaggaaagcaagtctcagactgagttttgatctggattaaattctgtcccaggtgcagatatttataggaaagcagggacaagagccctcaggcaaagctgggtatcctgcgatgggtgcctctgggagttcgcagataacaaggccttttcctggaggcaaagcagaagcgttctgtggcagaccagtcagctttctagcaggtcaggggcagggacatctaggcccaaggtgtcacaccgtgcctggctgctggctctcctcttgcaaggacacagctcttacaggacttcctagcccacccaagaacatctttccatcatcgaaaagttattgataagatttttccatcactgaaaagttattgataagtgccaccatgtgcatgagcagccctccaggtgctggcttgtgggccggtgtttgagaatcttgccagttgaatgtgggcatctgttgagggtttcccaaaggctaaccgttcgtgccagagggaggccgtggctcattcctagggccctgggtgagactggggctcatgcacacacaggtatcgatggcatgggctgtaacgagctgagtgcctgctgccctttcctagtggggggggtgggctcctggagaaagaggggaggctgctactctccagggccacagggagcccagaacgccacctcctggtgtcagcagcagcaaatccatataagtctgcagcaacttagcttttgcctcctcagaggaaataattcatccagggggcacaaggcagggtcagagactgaggtaagtttcagagcaagagtgaaagtttattaaaaaagtgttagagcaggaacgaaaggaaataaagtacacttggaggagggccaggtgggcatcttgagagagcaagtacacggttttgacctttgacttggggtttatatcttggcatgcttctgggggctgcgtcccttctcccctgattcttcccttggggtgggctgtccgcatgcgcagtggcctgccgacacttgggagggccgcgtgcacagtgtgcttactggagttgtgcggtgccctcttgaggcagtcttcccttaccagttcctaggggaaggtcacacgctggttaaactttgccactttgcctcgtagtgtgcatgcttgacctcactcaccaactcctgagattttttttaaattttttaatttaagttctagggtacatgtacacaacgtgcaggtttgttacataggtatgcatgtgccatgttggtttgctgcatccattaactcgtcatttacattaggtatttctcctaatgctatccttcccaccccacgacaggccctggtgtgtgatgttgcccgcactgtgtccaagtgttctcattgttcaattcccacctgtgccaactcctgggatcttatcgggaagtggctcatcatcagctttaggtgttttctatctattgggagcctgcctttctctggcaccagctgcaaccaataattattttagacagtttaacaacagcttgaccatcacctgatgatcacctgacatttctgttggggcgcgggcccatctcctgccccgctcatgtggggctcagtctgcccaacctttccccaagggcctgtctttacttcatttgtggtaagccccaagcagaatggactcttgttatgatcccaggaactgctcacggccacctctgtggatgaacacctagcggctgctctaaatacatgctgtgaaagttgtcagaatcaaaatggagtcactaatgttaagaaagccctgacaaagagttggtggggaaggccacgaagagaggacacttatgctgcatgcctgataccagaaaggactacaaaaaccacagcccggcacagaggccatcacacccttacacaaaaaatatttctgcaaggacaactgcccagcaattgcctgtccaacctcagactggaatgacctttgttattgatgtttgtagccaaggagaattatctcaaaaccactgtgatcctgctcgctttcctttaaagacctttgtcttccttgacctccctgaataggcatatggtttactatggcgtgtgtactctccttgtaatgttctgttctcaagctaacatctattcttctagagaacctctctcttaggctgacaacgctgtggatctgggctcccaggaactggggctgacatcagaggggtggaaagagaacagcagctctccctgaggggatgcttgccaaggataaggagacgatggttctctaaggattattttatattcatctaaaagggtatttttgttgttacccctagcctttttcccttttaattttctgatgaataatttatataaagaaaacccat

SEQ ID NO: 60 - DNA, 2822 bp, Homo sapiens
tttttttttttttttttttttttttactcacttagaatgggttttctattatataaattattcatcagaaaattaaaagggaaaaaaggctaggggtaacaacaaaaatacccttttagatgaatataaaataatccttagagaaccatcgtctccttatccttggcaagcatcccctcagggagagctgctgttctctttccacccctctgatgtcagccccagttcctgggagcccagatccacagcgttgtcagcctaagagagaggttctctagaagaatagatgttagcttgagaacagaacattacaaggagagtacacacgccatagtaaaccatatgcctattcagggaggtcaaggaagacaaaggtctttaaaggaaaagcgagcaggatcacagtggttttgagataattctccttggctacaaacatcaataacaaaggtcattccagtctgaggttggacaggcaattgctgggcagttgtccttgcagaaatattttttgtgtaagggtgtgatggcctctgtgccgggctgtggtttttgtagtcctttctggtatcaggcatgcaagcataagtgtcctctcttcgtggccttccccaccaactctttgtcagggctttcttaacattagtgactccattttgattctgacaactttcacagcatgtatttagagcagccgctaggtgttcatccacagaggtggccgtgagcagttcctgggatcataacaagagtccattctgcttggggcttaccacaaatgaagtaaagacaggcccttggggaaaggttgggcagactgagccccacatgagcggggcagggagatgggcccgcgccccaacagaaatgtcaggtgatcatcaggtgatggtcaagctgttgttaaactgtctaaaataattattggttgcagctggtgccagagaaaggcaggctcccaatagatagaaaacacctaaggctgatgatgagccacttcccgatagatcccaggagttggcacaggtgggaattgaacaatgagaacacttggacacagtgcgggcaacatcacacaccagggcctgtcgtggggtgggaaggatagcattaggagaaatacctaatgtaaatgacgagttaatggatgcagcaaaccaacatggcacatgcatacctatgtaacaaacctgcacgttgtgtacatgtaccctagaacttaaattaaaaaatttaaaaaaaatctcaggagttggtgagtgaggtcaagcatgcacactacgaggcaaagtggcaaagtttaaccagcgtgtgaccttcccctaggaactggtaagggaagactgcctcaagagggcaccgcacaactccagtaagcacactgtgcacgcggccctcccaagtgtcggcaggccactgcgcatgcggacagcccaccccaagggaagaatcaggggagaagggacgcagcccccagaagcatgccaagatataaaccccaagtcaaaggtcaaaaccgtgtacttgctctctcaagatgcccacctggccctcctccaagtactttatttcctttcgttcctgctctaacacttttttaataaactttcactcttgctctgaaacttacctcagtctctgaccctgccttgtgccccctggatgaattatttcctctgaggaggcaaaaggctaagttgctgcagacttatatggatttgcctgctgctgacaccaggaggtggcgttctgggctccctgtggccctggagagtagcagcctcccctctttctccaggagcccaccccccccactaggaaagggcagcaggcactcagctcgttacagcccatgccatcgatacctgtgtgtgcatgagccccagtctcacccagggccctaggaatgagccacggcctccctctggcacgaacggttagcctttgggaaaccctcaacagatgcccacattcaactggcaagattctcaaacaccggcccacaagccagcacctggagggctgctcatgcacatggtggcacttatcaataacttttcagtgatggaaaaatcttatcaataacttttcgatgatggaaagatgttcttgggtgggctaggaagtcctgtaagagctgtgtccttgcaagaggagagccagcagccaggcacggtgtgacaccttgggcctagatgtccctgcccctgacctgctagaaagctgactggtctgccacagaacgcttctgctttgcctccaggaaaaggccttgttatctgcgaactcccagaggcacccatcgcaggatacccagctttgcctgagggctcttgtccctgctttcctataaatatctgcacctgggacagaatttaatccagatcaaaactcagtctgagacttgctttcctagaactacaaccccaggggcaggtagcgtgggcagagacagagtcccacctcgccctgccgacacaacatctgttgaatgagaccaaatgtgggtttgtggcccttcatccataaatcctgcagatgtgccaggcccggtggctcacgcctgtaatcccagcactttgggaggccgaggcgggcggatcacaaggtcaggagatcgagaccatcctggctaacacggtgaaaccccgtctctactaaaaatacaaaaaattagctgggcgtcgtggcgggcgcctgtggtcccagttactctggaggctgaggcacgagaatggcgtgaacccaggaggcggagcttgcagcgagctgagatcgcaccactccactccagcctgggcaacagagcgagagactctgtc

SEQ ID NO: 61 - DNA, 6108 bp, Homo sapiens
ttttttttttttttttttttgaggcagagtctcactttgttgcccaggctagagtgcagtggcaccatcttggctcactgcaacctctgcctcctgggttcaagtgattctcctgcctcagcctcccgagtagctgggattacaggtgcccgccaccacacctggctaatttgcaagaatctctttgaggcaaattgaaagcttgaacattttaatgataaggttttgtgaagttttaaataaacataatttagaaactggttattacatgtaaagcatgtattcatttaaaatcagaggatcagttgcacattttctaataagcaggaatatttgtgaggtttagaggtggatctctgaagagtccagggattgaggtcagacctttctgggttcaaatctttggccctgccacatattagctctttgtatatcaatttctcacttgttaacccatttatggggataataactacaagtggggataataactacataataaggttgttaagattaaatgaggttgtcatgtaaggtacttgcacagtgtaaagtatttagtactcagcaaatctacaataaatgtgttactactatttaaagtccttaaaaaaaatctcactgataattcctaactgtgaagatagaaacatggaaagcaaggttgctgaactagaagttgattaccaaaaatatgcagccttttatacatgagttataattttttaaatggcaaaactccattatagtgataaacctttagaaggcagtgttctgtagaagcacttcagcatctcaacagatggttcatagaaaccatgcttttactgtttccatagggaacagtagcagtgatctcaaatccaaaattgagctcactgcagatttcaaatgaaaactgatgccttcatctttttcttctacaaaaatgctgttctatttttatgtacaacttttacacagttaattcttagtttaaaagcagtgtttagagtatattaattcaattgtgtggattgcttcagttgtggttttgatggtgtatattggtttaaattatttttcaggtgggtaaaattatgtgtaagtatagttaatcatatcagaaacttaggaatgattcttgactcatttttcttcctcatacctcacatccaatcaatcactgagtctttgaataattatcttctagatatctttctcatcagtccactcttcttcctccccactgccactgctcttatttaagtcagcatcctttgtttttgagcaagtttctgctatctctgctcttatgtatgcttgattcctctttcccccacacctaacccactcatctcaaaaatgtaatatgtcttttctgaaatgtaagtctcatcatttagaatccatcagtggcttactagcactttgaagataaaaatccaaaatccttttagcaaggtgtgtaggcctaccctattgagaaagattttaaatctttatgtttgaaagatacttttgctgggtataaaattctaggtttaaagatgtggttgtgctgttacctcctgggttgttgcattgtttctgacaagaagtctacagtcactctaatctttgctcctctgtatgttaagtgtcttttttctttcttttttttttaaaaactctggctacttttaagatttttctttttaccattgaatttgtgcaattcaattatagggtacattggtttagctttcttcatgtgttctgtgcttggggtttgttgaacttactggatctgtgggtttgtaatcatattttttatatgtagttttctattttcacatacagtttggaaaaatttttgctattccttaaaataaattttctatagtctactcttacttcttccttctgggactcaaatttacatgtatattagactgcttgaagttgttcctcaactcattgatgctttatatgtttttccaaccttttctttgttttaattttggatggtttcttttgctgtgccttcaagtttgctttttttgcactaatttgctattgatcccatcctatacatttttcatctctagaagtttgattttggtcttttttatatcttccatgtctatctttaacatgagtattcttttctctacctcatttaacataatacatttataataggaatagtatataaagatattaaaacagttattggggtcattttcccccctcattttgggtcattgtactgctgttttgcatgcctggtaattttttattggctatgaatttatgctgttggtttttgtgtgtatgtgtgtattcttggtagtcttttaaatattcttgagagctttgttttggaacactgtaaagttattggaaacagtctgattatttcaaggcttgcttttaagctttgctaggtgggcaagagcagcctttagtttttctctatttactgaagcaatatccttctgagtactctacctgatgctctgttcattatgaggttttttctttggctgtagtagcatgaactattcccagacttgtgtgaactttggaatttttctgcctgcttcttggaggttcttaacctgttcttgggtattccctcacatgcttgtgctgatcaatattcagccaaagacttgaaaggagccctctgcatgtctctggagcccctccctttctgtgcagctgcattctctctggtactcctacctaaaattctagaccccaggccttccccaaattctcaattctgtctcctcaactcagcaagactgcttggttctttttggattctcccttcttgcaccacagcctagaaactgcctccttgtaaaactgcctgtatgcaataatcttggagcaatcatgggactcaccttgtttaattctactgtcctgtgctgcctggtgtctatatctaaaatccattttttttcatatttttaaaattgtttttcagttgtttgtaagttgaagagtaaaacaactcttccttaccttagtaaatgagtttctccaattgctcaggctgaaagctccatatctaatctactaccatgtcatgccagttctacatttccacagctactaggttaaacctccttcactctcacttggactactgtgtgacccactggtctgtttccattcttgtctcctacagttggtttttcatagccacatgaatgagcctcaaaatttggaaactaacattgttcctacttaaacctttcctagctttctctttggtggcttccaaggcccttcattatcatgcttaccttgccttccagcttcacctcctttactttacagcctcactcctttacctcactaccacactgacctccctctgctcttctattattccaggttctttctcatatcaggcttgtgcaagcttgtttcatctgcctggaatatattttcttaggttcatctctggctggctgctgcttatctctcagctgtcagctgtcagttccttagagggccttctctgatgaccctagttaaagtagttacccattttatccattatcagttatatcgccttattgatttccttcatggcacttaccacaattttatcgtgtttattttttgactgtctgtcgtttcctttcccgctacagtgtaagtcccttgaaggcagagacttcttcttgtccccagaacatataataggtgttcaataaaaatgtgttgaatgaagaatagacctcaagtaatttaccatttgtgtagtttttttttctgttaggatagaagggtcatacatttgattcttgagcaatgcaggggttaggggcactatcctcctttcctgtaaaaaattcatgtgtaactctgatgcccccaaaacttaatagcttacagttgactgggagtcttgccagtaacacaaacaatcaacacattttgtatgttatttgtattatatactgtattcttaaagtgagctagacaaaagacaaatgttataaagaaaatcctaagaaagagaaagcatattttccattcattaaggagaagtggatcatcataaaagtcttcctctttgtcatcttcacattgagtagactgaggaggaagaggagcggttggtcttgctgagtcaggggtggcacaggtggaaggggaagcacaagaggcagtcacacttgatctaactttacagaaatacattgtaattggactttttgcttttttcatttctctaaaaatgtttctatatggtaccaatcgttcttctactgtttgctttagtttcagtgtccatatcatagaagagtccatgttgtaaaagaagtcaaaagcagccttgaataattggaacccttctgccagattgtcttacatcatcttgttctttggcattgcttctaagttttcttcctcatcatcttgcactgatttggaagcactcgtctccatcaacaagtcatctgttaattcctatggtgtggggtttattagctcctgaatttctcttgaaacccttcacaccccactttttttgccacatccacaatctctttcatgatttccttgattgactcttttgtaaatcctatgaagttatgcacaacatctgcacaggtttctccagccagaatttattgttttgggcttgttggctttcacagctttttctgtaacaatgatggcattttcagtggcatggcataatcattccttccagactttcataatgttctctcttggggttctctttcacagtattgacagtcctttccagagtactgtgtgtaatggatctaaaaagtccttatgacccccttattcctgaattaaagatgttgtgtttgggagcacagagaccacttcatcgctttggtgttgaatttatggggttttaggtggccaggggcattgtccagtatcaaaagaactttcaaaggtagtgtcttactagcaaggtacttcctgactttagggacaaagcattgacagaaccaatccagaaaaagggttctcattgtctaggacttcttggtatacaaccaaaagactgtcagctggtgtttttttttcttcttcttcttcaaggcttgggggttagcaggtttacagatatgtgtagtcctgatcgtaaacacaactgcatttgcacagtattagcttatcctttcctgcctaaatcatggtgcttgcttctctttctaataaatttcctttgtggcattatttcccagaataggcactttcttctgcattaaaaacctgttaaggcagatatcttttcttctcagttatcttctgaatggcatctgtgaactcgtctgctgcttcttcatcagcaaatctactttccttttgctttgtcatataactttgctttttcttgaatcacattggaatctatagatatgccttagagcactcccatacccacatgaagctgcattttaaatgcaagttaaaagctatttcacaaaaagtgcaaggttttcatgcctggtggcataactgcagcaaaagcttcatgagtttttcttttctttcctccctccctccctccctccctccctccctccctccctcccttccttccgtccttctttcttctctttccttctttcttttacaatggtccttatgctggactcatttatcttgaaatggtgggcaaccacagaccccaatctatggtatcaagcaactcaactttttcttgtaatgtcatgactcttctgtgcttcttgggagcacttctatgactggtggtgcttcatatgggtcctgcagtttttatgtcctcaaggtttacagtattgcactaaccatgaaaaatatgcaagaaccgcaagggatcactttttactgtgatccacggtttatggagagatgaactgctcacacagagatgattagcatcacatggtgttttaaacagatcttttgacacttgagttcaccacaatagcaacaggaggtaactacaaaataattatagtagctcagtatgtactacagttaattttatgcagttatgatttaatactgtatctttgtttacatttctctcaaccgtgaatggtgccatgtacagtttgtttgtatgttttataaatttaacttttt

SEQ ID NO: 62 - DNA, 5158 bp, Homo sapiens
ttttttttttttttttttttttttttttctttttttgtaccctgaaatttattagtttattctgaggatacaaataacatttatatatgcacacatgagccatcttaatatttccatttagttcagaatttcaaaaatatcaatcgatccttgaactttcaagtatagaaatgagtttagggtaaaatagtaacctttgaaataattacagtactgtattagatttgtctttttctttaattgcttaacttcatgaactcatttgtttttttctttttaatttttattcatctactttttccaatccccaatgtgattaaattcagaagaacagtatctttcaagtaaatgatgcaaaacttcctttcacatcatctcacgtcctttccccctttgtattagtagataattatactatctacagccagaacgatcttcctagacgtgatcatgctatgtgctatgaaaaaaaccttcaatggggacctccactaccgaaatgatgtggtagtactggcagtcgctcccaggtgcagtaactaggaaaaaatggatcaaatgcaaaatacattacagatacgaaagagctgtggaagcgcttaagactagatgtactaaaagtctttgtcttttctacatagctgagactaccaactgttttctttcctggcatcatttgccaattctaggcatggattaaagatcaggctttgtgtggactaaagcactttactggggaaaatcagcaggacttttactgactgcatgatctatcatgatgtactagaatctagaggagccctaaacccaatactgagtgagactagaacttaggggctaggcaaacaagttttcttaacaggccaataccacctctcaatgccaggcttcttcatatcctattctttctcccatttcctctcttgtatttggccacttctatcctttttcccccctcaggactctgctatttatccttcacgaaatccatccataaaatctaccaaatacgcaccacagaagctttctacaggcttatctttggcataatttttatttaacaacctcttattttccttgttgtatcctttcttggaagtggagtctttaattatctccagcacataggaagtgaactgagtgctgaataaaaaataagcaatggaatcgctacattaaagatgcttacaaacttttattatcaataaaatctataaattttacacctatcaactcagaacaattcactgggaggagaaaaactattaaaaagcctaacttcaaatgaactcaaactttcctgccaaatcataaatatgaaaagtaaatcatccatgtatgctagaggatctctctgggagaagtgtcctacaatttataacattttacaagtggttaaatccattaaaaacttcaaaaacttttagattgtctttctcctgtaatgtgatatcttccctaacttgctaaactgagaacccagctagctttacataactgaaatgattgaatttgtttgcctaatacactaatatttgatttaatgaattatctcactcccacaaagtgtcttatgttagctgccttcatacgtggccttttaatcatccacatctaagaatactgagatgcaaaaattgctcagagtccagatgataataaggctaagtttatttctaggcacaagcatttagaacaaactgcctgcaagggacaaatttaccgccatgggccttttactttcacttggtcttacagctgcagaatccatccctaatttttgtcaactgcccattggccttttagaggttcttagtaagaaaatcaatggctgaactaactactgcgaaaactgaaagcacattatcttctcatggtaattaagtcatttaattaatattaggaaataaaggaataagcactaataaatggccatttagattctggttttgcgtggtgacttagatgtcttcagtttcatggttaagagtgtaaggactttggaatcagtttctaattttaaaattaaatttcatcatttgctatctatgtgaccctggaggcaagttatgcccctttcctttgcctacatttctccatctgtaaaatacaggttatactgtaaataatcatggtgatgttctgaagagaaaagctatcataagcacttagcaaagtgtttggcacattctaattatgcaacaaaagctatcatcatgtccacagcttcaagttacctcttgtaactaacacttcctaaattcctatggctaaattacaaatttctactcaagtgaattaagtcctgtgattagacacctactttccctgaaggttttaaaattatcttcagattctggctttcatttgtcttcccaatggctttctgttcccttaaatttgtcctccatctctgcccccaattactcagctctttcctacagaggattttaagtagctttactgggggtatggtagaaagagaaaggggacttgaaggaatctttaaggcatcaaaaatagtctaagttggcctcaatatgaactgagtagtctgggctcaatctgttactggaattcagctttctttagtaggaagcctttgaaggttttacataaaattataatgatcccatttattactatcagcctaaagaaccatttaaaatttgtgaattttcttgacacaatttccacatttttctgtaccttaagaatgtatcatgcctagttttatcaatcatgttttatcactgatactaacagaatcaagggtctgtggtacatttattttgcttttgcccatccagccttccttgcccattctggaaaaagaatgttttcaataaggggacccattacagatggtttgggtggcacactgagtatttagcaggtgagcctaaatactcctttattggatttacttattcccatgcttgtgtactgctacttacatcacaatcaaaagcagggattaccagttttttgaattaaaacaagatgccctcaaagttcagagtgctatgaatgttgcaacctcaaagttagctagtgaatttacattactgcctattacgactctaaatcctgagagccagaaaaggcctatgagcctcagatcttacaaatagcctggagtacttcttgaggatttgtaaacattccttggactcagcagtcccttgagaaaatcatttcctccaaaatctgtgtctatattctctatcttgtttaagctctccctccattcccaaacctaggaatcatcctaaattttcatctagaccctaattcaagatcctcagtctctcttctcttcctactgcttctgctgtatttcatgccctcatcctaactggtctgtctctacaccaactctaattgttcccttctatcaaagctaaacttgatgctgttttactggatgttttatctaacacagaggtaagaattattatttacgagctacatatcactatcaaaatggcaatgaaaacttttgtgctttttgcagtaaggattctgaaacttcaatttggaggctgttaagaaaaactagagaccctaagagtcatcaaatcacaagtgatgaattggctattatatccaaaaccatccaggcaaaattactacataattttataactttactaacacaacaaaaaaattgttcctggttaccaaacacattaagagttttccatgctatatgcccatgttatatcagaagcagcacagaatagtggttaagagcatggaacaacacagaggcaggctgcatgagtttgaaatctttataccacaactcattagtctgaactctggataagctacttaaccaatgtcataaagtcagtttcctcatctgtaatataagaataaaaaaacccacctcacagcatggtaaagaagattaacaagttaatcataaaaataaaatctgaataaatatgaaactgcaaaatgaaataagcaaaatgaagaaaaggatcagggtgtttaaaaatattaatacatccatctaacctctttactgaacgaggggaaagtgcctcaagttcagggaggtttcccttttccagactcaatcactgattttacttttattagcaaagtttttaaaaaataatttaaacatttaagcagcatctctgcctaatgaaaaaggaatggcaaattgaattattttgacacataatctttaagaaacataaaaatgtttaaggctggaagttatatttcttttcaatggacattaaaggtgacccactaaccggaaaaactaagaaaagtcattgagtttttagtgaaaacatggtcttcagaaaaactgttcttaaagataatcttcacaatgaagaattctgttaaaaagttaaagaacatgcagaagaaaacctctgcaagcctggtattttagagatagtgccatatgtataaagccataggcatatacgtaactgaagaaggcaagccatccaacaacaccagattaagttgttaagatacctgggcagtagggaagcagtcagggataattaacaacaacaaaaaaaaacctatcaaacaatcaaaacaaatgaaacagaaaaccctattaacaaaacctaaaaacaagctgggcttaatagcttgcatttcaaaactgaggccatggaattatactggtgaaaacaaagtaaataacaaatatgaatgccaagtcaaaataatttgccataaaagatgaacaacaacaaaaaaaccctgttaatgttcaaatagataatttaaaagtacctgactgctaaaaacaaaatttacagagtacatacccatatatcctaaaagggacaccagccctcataaatgagcttttaagagtttacttggccgggcgcggtggctcacgcctgtaatcccagcactttgggaggccgaggcgggcggatcacgaggtcaggagatcgagaccatcccggctaaaacggtgaaaccccgtctctactaaaaaaaaaatacaaaaattagccgggcgtagtggcgggcgcctgtagtcccagctacttgggaagctgaggcaggagaatggcgtgaacccgggaggcggagcttgcagtgagccgagatcccgccactgcactccagcctgggcgacagagcgagactccgtctc

SEQ ID NO: 63 - DNA, 1134 bp, Homo sapiens
tataatttttttttttttttttttgtgttgagtagagacggggtttttctgtgttggccgggatggtctcgatctcctgaccttgtgatccacccacctcggcctcccaaagtgctgggattacaggcctgagccaccacgcccagcctattttgtgtttttttaaagctaactaccattaagatcattatagaagtttggtataatgaagatttgggtttttcagtccaatgagtttccatattcttgaatgaaaaagatccacatttcatcatttgcctgtttcattttcttttagtacttttgaacttagtttggtcagaaaatactagaattttagtttgatctaaagaaccagcttatataacttgctgttgccatgtacatttgtatgtctttgctgtgtcaaataactggatctgattttagctctttttaagtggtgaaagcaatgcatttttattcttcaaattcagacattgaatgtgtattaaaatgtgtgtgcttacctttaatcctctccccaccgacaattaggaacacgtttctccaattactgttggcaagactaccaagaaaaattgttgaattagaatcccagcaccgggcacggtggctcacgcctgtgatcctagcactttgggaggccaaagcaggcggatcacctgaggtcaggagttcgagaccagcagggccaacatggcgaaaccccgactctactaaaaatacaaaaattagccaggcatggtggtgggcgcctgtaatcccaactactcaggaggctgaggcaggagaattgcttgaacctgggagttggaggtcacggtgagctgatatcacgccattgcactccagcctgggcaacagagcaagactctgtctcaatcaatctatccatcaatcgataagaaccccagattgtatagctacatgttttagcccccttttcaaagtatatgttctccttggtacttattttgacattctgacttttctacatatgctttatcaacctcttaattaaaccatcattgtctattttgagagataactgcgctgcttcccattgtgtgttttaaatgttattgttcagtttgagtcaaataaaggatatttaatctgtggtgccttgac

SEQ ID NO: 64 - DNA, 6664 bp, Homo sapiens
tgtgggaagtgggcggacgtgcggggctcagcgagggactcccgggtccatagagatctggggagggtggggggagcaaggacgagtgcctgccgggacccccctggctcctcgctcccaaggagtcgaggggaacgtctctaccgcgctgcaaagccagcaggtaactttggggaggtgcgggccaggccagcgagcagcactcggcccaggcgccgcggggcggacggattggaagccggatggaggcgtggccgggtgggggccgcggcggcggggaggcgcgttcccggcgcgcagagctctattgttatataaaagtgccgaagcctgcccctcccgagcggaaaaccacctgtgtgcggccggcgcggcgcgagagggatgcagccggaaggcgcgggccctaatccggccttccctccctaaaccccggcggaaaagaggccgcgctttgtcccaccgctgcctgagaggcggaagcgggggcagccgtccggcggggtgcggctttggggagtgtcccttgctgcgctttgcgcctaccgtgaacaccgcgagggcgcctaaggtcgcggggtctcccttcgcccgacgccccgcacccacgggcatgcctgctaacacccccgctgcaatttgcatttttagtcacccgcctcttccctggtttgggaaatgtaggctaaaaaaaggcggctgcgaggcctaggttgccaattttggagctctgcttcaggcaggccgcccctggaggagcgtgttcgacaaaggtggggattgccgagctcctctccgcaccatttttgggcagtccttggaacaaaactcgtatatttcactgggtatcttctagtttcagccgggggaggcctgcgctggagttgactccccctgtcctccacgatctgtcacagaagttcccaccccgagacgtttcagtcattgggacctggggacagggagggaagaggcaggatgcccttcagcggaactgagaagagcaaacctgttggaggttcagcacaggacctccaacagaagagaaaagggaagttgggtttctactttgcctgttttaatacgcagctacttgagtatgactatagattcgggaggatacatcgaaactgtagttttacccatgcttctgaactttatcgccaagggaatgccagtgtttcctggcgcattgattaaagtggcgttctgactgctcagtactagaaatgctgcgaaaagggcttctggagtgggacggccctcgtttgcattatgtcccccgcttcttcctaggtaagcgcccttagttaaatcatttagccgttctaagttgcagtcttccacgtcggcataacgaagataaaactatctgcttcatagggtccctgtgacgacaaaatgggtacggtgaaacgtcctaaagtggtggtggggtgctattagccgttggaattaatttttcattctgaattgaggacctgtaaaaaggcctcggcttggggacacggtttgggcatcccacagatgccccttgaggctcgcttgacagcccgcctggactcgctcatctgcagcaaagccctctgagatactaccctaaccgatttaatccgttccaattcagctgtcaagtaaagggggtgttatcgtagaccaggatcaaaaatcctttagcacagttatcagaatggacccagctacatttctgatttctccctactggtcacctttggaacacgctgttctccagccacagcaaactgatacaacaatgcatattgggcacttaactgcatgatgggtaccgtcttgtttctgtgtttacttgcataatttcggacagtcttcagaaaaaaacatgtaaattatcccatttacaaagattaaagaatttgcccaagggcacacagtagcaacagagtgtcaagacgtgaggccaaaccctttacagactcttaaggatgcccacatgcacggattacatagagtgttatggacactatattcacctccacgtggtattccctgcccacatgtgaagaatttcaaggtcagcattttgaattttgacctccaggctttctccagcctcacgttttctgttgcatcctccatgtcaaagatcaaaagcgaggctgctttccctgctccttttacacaccagtggttttctttgcacgcaacccttcatcagtcaaacattcactaaatgttgcatattttatctctcttagaatatgccctagatcctaatcttcacaagtgtcattggttatctagtgcgtcagcacagcacataagcctaggttcaaacctctgtcactcagtagtagtctgggcctcacttcattcattcattgatgcatttattctagattccaggaaagcagtagagaataaacagacaacaataacctgcctcactgaagtttacattctaatgaggacagtccaattaacaaaacaaataattatatattagaaagtgaaagcgctatagagaaaaagcaagaaaaggaattcggaagtgtgtaacattgggaatatatattcctccctcaaaggactgtgaggattagacacaactgagatgacacacgagaagtgtagggcacaaagtcggtattcagaagatgatttttaaaatatcaccacttcattcctgcataaggaatgctgttggtggtgatattgccattcctgtgaggcactgaggaaaagctctcttaggagataagggctgtagtagttggaagaattacaggcttccttaattccagaggcctcagtgcccttcagaggatatcattcatatgaagaggtctgtatttaaaaattggagatagcagatcatctgtgatccattctcatgagtgcagagaagcactttcatagattcttgtttcttcctctgtgtgtgtgtgtgtgtgtgtgtgtgtatgtatgtgtgcaccgagcacctgtgcttgtgcttgaattcctcctggtgtttccccctggaaagttccttaaaaattgttagttaaaaaaaaaaatttttaaagcagtgtattttggttataaaattttctctaggccatttgagaaacattccacttttgcaggaattttcctgagtttgagggcacttgagatttataagatgcaaatgggctagcatgacctttaatcttcttggaataatctctgtgaatacaatgacatttattaacacatcatgtgaaaacagtttaaacagattttcagcaaataaggagagttttggaagttctgacttaaaatgtaaatgcatttaggggtccccaggtaggccctcaaagtgacagtggctttcagtgcagctaaaacttcaaaactgaatttaactgtatttgaaggatacacctgaaatagtatggcttaatgtaaaatgtatatgggttgcacaaaactgtccctaaggtcttctgatgagtgcttttaaaagataccaagaagttgtaccacaacagtagcaaccgagaaacacaagaagcctaaggaactgacagtaggtaacatgacttacaggcagtgataggctgtgagaaagccaaagggaatttcaaatagcccccaattaaaattccatgagggcagcccctgggaattgcagatccaggtttgcaatcaaactgcttctcacgtggaagctccgtgcagcttgccccatgatgaggagctgcaagggcttattgagcacgggttaatgatttctccaacaatgcgggggaaggggaaaggcaggctaggttagacctcaaggcagaggtagctggacagcaacaccagaatcacacccacaagcatatctagggggagattggagcttccccatgaacgagatggcacattcacgcattgccaggatgataccacctgaagaaaaacatgaactattgtgaaattcagaccttagccaatttggctaagcttttaaaaattacggtcttcgtcagctttcttgcatttctgtttcccgtcatctgatgaaagacaaattaatttacattcaggctcctgtagagactttatctagaatttttttaaaagctagacggtctctagcaaagaaattcattaaaagatagcaatgttaattttttatttcagatgttttaattccatgccttccactgggaaaatattcattgattcttcttccttatcctttatttttacaaagcaggaaatgtaaaaagcatatataaatgtatatataagaaactcatgacgttggcatttctgcagtacatttctgagtaagcgcatttaccttcttttggaaaggagttgacggtaccttgtttcccgttgtactattttgaaagccccagcgatgatccttagtgggaaagtatagcttacattgccagccaggtaagtgagagactatatgtattcagctctccaaaaccttctcatgtcgtgtcatgaagcaccacatgtgtggtgtcgggcattatccatgttgcatcttcatgtggaatatttgccgtgagcctccctgtgtgggctgtttcctctggtgacttttctctccatcttgtgttgctttatttacgcaggtgtgagtagtacatatagctgttgtgtaagagaactcattattttcctaagtgggtactatttcctgccaccctatttttgcttcagaaatcagtggaagtaactgtgtgtgtccacaatacaggaatgctttagctcagtttttcaaactttaagaacttgcagatcccccaagaatatattaatagaaccctagggagccccaaactccagtctaaacaacactgcttaaggctgttggtgggttcattataaaagttatatctggacatatcatgaaataacaacatagtggctacaacttattctacaccaaccattgtacgggttaaatctaaccattgtgataaccttgcaaaacaggtataccattatcacaactttaaggtggggaagcctgagctctaatgtcaggtaatttatgctggaatccaaacttgcatctcagtcccttcaaagctccttagtacatacacactgctgccaacctgatgagtggccctgaatgaattcaacctggtataccatgatagcttctacataatttgttacactttatcttgctagtcaagactaggacttgtggaatcagcccaacctggattctaatcctggcttacctactttctggccctatgactcagggaaaccatttcatctccccatgtctcagtttccttatctgtaaaatgggaatactctatcacagagctattgcaatcaatgatttatatttgtaaagtgggtagaaacagtcctagaacaataactcattgattgctacctgtttttattgttacacacacacacacacatatacacacaattcttttttttttctttgagacagtctcgctctgtcaccagggtggagtgcagtggcgcgatctcggctcactacaacttccgcctaccaggttgaagcaattcttgtgcctcaacctctcaagtaggctgcaattacagacgtgcactactatgcccagctaatttttgtatttttagtagagacagggttttgccacattgcccaggatggtcttgaactcctggcctcaagtgatccaccagccttccaaagtgctgggattacagatgtaagctaccgcacccaaccacaactcttaataaatgtttattgactttgctgaaaagggatcatataacaaaaaaacactatagtgttaatttagttctcaggaagagaaaaacaatccatacacattttttgaaaaaagtttcaaagaacagaatcaactgctttacggcccctcttagttgctgatataagcaacccagaaattgaggtttcttaatgggctgagatacctggatagtttggggacagtgaaaacacactgcgtaccaggggttccccatcactctaggactcacctgctgaagtagcaggcactttccctgctccatcaatgctggctcatagctgatcctatggactgcatattgtgcaagaggagaattggaaatctactagcctgagccacatagctgtcgtctctcagtaatctgggttcaaggcagctaatggaaacacacatttatattatgagtcctgcatataagaagtcccattctctgggaatctcctttctccttccgacttcatgcccagcaggagcttttcagaatacaaggagggggaagaggggagggtcagagctgagcatgagagccactcttctgtgactggaaggaaacttccattcatggacagatgagaaagcctgtgctagaagccaccttgtagaaacatacccaggtttgagtaaacagacacctgcttagcacagtttccatactaatttttgcacatatatgattccaagattatttttattaaacatccgataagtatatatcctttggtataaatccatcaggttttgctggacctaccagaagttttagattccttacccaaacctccaaagtgtaaacctggccgggcatggtggctcacgcctgtaatcccagcatttttgggaggccaaggcaggcagatcacgagtcagagatgggaccctcccgcctacaaggtgaatccccattctac

SEQ ID NO: 65 - DNA, 1016 bp, Homo sapiens
agtcagcaagagacgctggggagagagcaggcgcgagcccggcggatgcggcagcgggcggcggaaggcggctggggagacgctactccaactgttgaattgaattttcacctttcctttcatccgctgctttgcttgcggagatggatttatttgctttgaaatccgcatatctttctcagactgtggggtgatcccggcagacaccagactgaaagagaccacccgtgacagaaaaggaggaattaaaaaaaaaaaaacctccacaacagactgcacaattaactgtacacatcgatgttggactttgtgaatagaaaaaattgagaggaaaatcttgaactatgatgcgaggctaagctgggaacaattactggaaacctgattttgtttttccttttccaagactctgaaaaatttcggggtacctctcgcctaaccaagaggaaaggtttaaaaaaataaacaaaataaataaaccaatacacctagcaaagcagacgccttgttttccagaacctcggactccggcagaaagaggtagagtaaaagtgctgctagattcagcttcaccttcttccctccatccttttctcttgcattttctttttccccaaaaacatgaatctggtttttctttctatagactgagtcagagaaagcgttaggaagaagccgcaactaatgtctgtgaagggaggaccatgaggcgagagtgaatacgattcgttccgctgcttctgactcatccggcagatcggaacacctgcatttctggatgtgtcattcccgtatgtcgaggcgcctccagaacccgaaataatgtgtagacagacctgtgtctaacatcccctcggagggagctccccggggtaggagcccctggctggaccgccgcggccgcagctctgcaccccctgccctccctgagtcgcccagaaaaactgaaagagagactgcagaatgcatcacgccaaaccttgatgtgttgctttcatcagcccactcctcctact

SEQ ID NO: 66 - DNA, 3906 bp, Homo sapiens
agtggaagcatgggcggcgagccggccgtgctctcggggcgcggggtccccattttgggcgagggcggccgctcccgcgctcggggtgggcgcgccccatccccgtcccccgtttcccgtccccgtctcccgtccgcatctccgtccccccgcagccgcgaagcgcggggaggttccagggcccgcggccgcgggttcgcgagcaccgcgctccagatcgagagcggcgcgcgcccttccgtggaggacagaggggcgcggagggggcgcctgtgtcccacccgctcgcgggcgctttacggggcgtcctctgcgccattcacttgtcagcttgtcgggaagttgaaatcgcgtttgggaggtaataggagaaagagatcggggacggcaggcggagaaagtgcggtttccatagcgccggggagagggcggacccgcgagccagcggtccctgagccgggagaccgcgcgggcgtctctccagcccccgcaggagcgccgccttccttccgcaggggcgtcctctccccccaccgctgcaggagcacccccttccttcctcggaagcgtcctctcaccacaccgcttcaagagcccccccttccttccacaggggcgtcctttccccctccgaggcaggagcgccccttttccccccacaggagcgccctccccaccccaggagcgccctgcgcccagcagacgggcaggtgggcgggcgtccactacctgtgtgcgcggtgcgggcggtgactgccaagttggagatgcccttggagaactgcttcgaattcatgtatctactgggcttttgtgactttcaaagcctatagcaaataagcacccctgcaattacatctcctcaatgaccaagtcagggtgaggtgagggcttcctgagttcagatcccagcaagctcccgatcctgcgcaacgaagaaaactcaacaaaacaggctttggctgtttattttattttttttttaattgtgccttcatgaaataatttacagcaataatttatcttataatgttggttattgtttttaagtcccggatgtttacttttggatgtcctctataattcatagaagtatcttaaaagtaataaaatcttaatctaagagaaaataagtgtaatttttgaaagagtgatatatattttaatatgtttttgtaacatgtgacttgaagattgtgttggctaattttatgtgccaagagagccctgactagtacaaagattatagcgtttttatttttagcatgtatacagttaggattattgatcagtagcctgaatttgggaagaataatcattgtggcaaatatcacccagtgtgcctcaaaaaggtgtgtttaaagttgatcttccatttttaaatcataccttaaaaaaaaatacctcaagaaatgccattttaagtctgtgcacctatgtgtgcatgtgtgcgtgtttgtttatataatagattgtgtatgattgtgtgtgtataggtatgtgtgtatgattgtgtgtgttgggggcgccacctttatgaacattatgcttcggcgttctttttagatcttgttaccttttcttacgttcacaaatgttgcctagcaatatgtctagtcaggaaagatgaagggattcttatcttggtgcttgaagaaaatgtggtgtagttttattggctttgtgatcacttacatcccacttttatgaggatgtaaatgggccacctctatgttcctgtatgttgccagccatcagtagacaatgctaaaggaaccaccacttttaaacatcatgtgatggtttcttctgagaaagtatattttgcaatctttttctttttcatgttgacttttattatgcagttgcattttcatatccgtattgaacatttacttgctgtgcctgtcacacgctagcaggtgtcatcttttcctgtttgcttgtttcttggggccatcctagtgttaaaggccagtgtttttaaggtgtcagcagctctggattggcagttagcactttccccatgtactgcctcagttaccagactgggaacaaaagagagaaggttaaagaattatcacctatgtccgtggtattctgtcatagagagtataaatttcctacagcaaactggaaattaattgcaattctgcagttagaacctccaaatacaaatgtggatgatacaatttcaattctcattgagagtcagcccatgaaacaaaccaacagtaagaaactctgtaattagaagtatcccagtcctcttcctcaaccgaggaacttgttttctttccccctttctattgccagataagctatttatgtatttaaagcttgttctacaccttgtgattttccaactgttcttccatactttttcaacaaaagtcagctaataacatctgccaacatgctctgcacgcaggactggctggggctggcatggcctcttgccagcaaacagcctggttgaaattttttctcatggtccaagatctttccttggaagctttctttcctttcacagctaataaaatggccatatctttcagcagggagttttttctgtttgtttgttttttctatttttaacagaatcatatacaataatgattattttattagaagtcttctgaaataattacttttcaagaaagaatcaattatataaaagtgtagagatttaaaaatatgttacaggttcacaatacaaatactagtagcactaccaataatgaacatcactaattattttctttgtttcatataggaaaggcaagtatgggaggagaaaggtgaatagcattttattgcttgtgaaattttctttctttttttagttctttgccctgtaggtgtttgacagtattttgtatttaggtgagctcaatctaaaaactaagcagattaagtggaatgctatataactagttagaatagctttaatttaaaaggtattttaagagggaaagatttttaacttcacaggtttctgtcaaaggatatatttaatctttaaaatgagtggcaccatttcattatatttcattttattagataatgttgttcagtagctcatttgagaaattccattcctctgatgaacgaactgtggacagacttttcctcatctagggtttataaggaaacttcttgcacttaccagcaaatttatttgctaatgtttcaactgaaatttcacaagagttttgtaacatgctaactctgtgtatgggcaacagaatgacttacatgagagaatataactgctgtttggatcatttgctatgtatggcattgcaaacatttaaagtatcaggatttgttaatggaattgatcagccccttggaaattataaaggctttctacttgtgtgtttattattcttgttaaaatatggatcagtctctttcctaaatgttcattttatgagggaggattttctaaaataaatgattatttaatgtgcatatatgatagaacaaactactataacttttttaaagtcttatcaattgaattaatactgtttagaaaaatatgttgtagttacaaatgcagctaatccagtattctcaacatttttcattataaatataattatgttgaagaaatacataaatgcccaattaaaaagtgactgcggttaggagttgaaaatatttattaatatgcctctggattttgttctgtttgaattttgagaatgtgtttctagatttaagaagcaacacaagctttttttcccagaaggcttcctattattgaaatggaaattatacattaatgactgtataacactagtagatatttttaaaatgcaagagcatcttcttagatcattacttttccttggaagcttggcccctgtaatataatacaccggtattttgcatgat

SEQ ID NO: 67 - DNA, 2330 bp, Homo sapiens
ttttttttttttttttttttgaggctgtctcactctgtcacccaggctggagtgcagtggtgcagtcttggctcactgcaacctccgcctcccgggttcaggcaattctccctgcctcagcctcccaggtagctgggattacagtgactcaccaccacgtccggctaagttttgtatttttagtagggatgggatttcaccatgttggccaggctggtctcccactcttgacctcatgtgatctgcccacctcagcctcccaaagtgctgggattacaggcatgagccaccgcgcccggcctaaaacctttctaatgtgcatatttttttgacccaaatgcccttagagtatttgacacaatactcttagaacattctcaaggtgacatcatttatgattctaaaggtttgagaagaatctacaaattcaacaatggaactgattgagcaggttttggtagagccacgcaacagagttttgtgcaaccattcaaaatgatcatatggaagtatatttatttactggagtaattatttattcattggtaattggtcaattcagtgatcatttttctattctcagcaacatttaacacagttgatgttggcattacctcagtgacaagacactttccagatttctcttctgtctcatcactctcatagttttgctctgtaggtatctacttcttttcaacttctacatggaaatgccccaaaactgggacccaatctcttacccatctatactctccttcagaaatatatttacactcacaaatacttgtcttagactcagattttacactcctatatccagctgcacgtttgaggtgtccatttgagtgattaatgcataagctactcaggcttgaaatgaccaagatcagaactcctgaatcctcttttcccaaaccactgccttatcttatggtctcttggaagcattcaaagcagttgactgccccttcgaaacacatttttctcatgttttgcagaactccaagctctcccattttcctcctttatgctcctgccagttctgcaaatgtgggagttgcccaaggctttgttcatcagccctcttacctaatcacatttcttccaagatgtcttatccaagcccatagttttaaatgccatctgtgttcaaattagtcctttcaacagatatttattgtgtgcttattgcacttattatataggtaattaacaaagatgtgaagcagttgcattgcttttttttttgagacagagtcttgctctgtcgcctagactggggtgctttggcgcgatcttggctcactgcaacctccgcctcctgggttcaaacaattctcctgcctcagcctcccaagtagctgggattgcaggcacctaccactgcgcccagctaatttttgtattttttagtagagatgggatttcaccatgttggtcaggctggtctccaactcctgagctcaggtgatccgcccacctcggcttcccaaagtgctgggattacaggcacaagccaccatgcccagccagcaattgcactttcatatcctgggagtatatattggaacactgttaacataaggcttacgacaatgaaattctcccagatacacattcaacagaaacacatatccccaccaaaacacatgtactacaatgtgtgtattcatagcggcactatttcatagttgacaaattctggaagcaacccaaattctcattcatagtagaatggataaatgtaaatatccacccacacaatgcactactcaacagtatagatgagtatcattaacataatggtgcttgaaagaaaccagatgtaaaataatacatatgactctgtcatataatagacaaaacatggcaaaataaatctgttaagccaagctagtgatggccatgttgggagagcttctgggtgagggtctgttaatcttggttacattgggtgtgcaatttgtgaaattcattgtgctgtacgctgacagtagattttatgtatcttatacttttagagttaaaaaatgtacttttttttttttgagacagagtctccctttgttatctaggctgcagtgcagtggcacaatctcagctcattgcaacctccgcctcccaggttcaagcagttctcctgcctcaacctcccgagtagctgggattacagatgcccaccaccacgcccggctaatttttctatttttagtagagacggggtttcgccacgttggccaggctgctgtcaaactcctgacctcaggtgatccaccctcctcggcctcccaaagtgctgtggattacaggaatgagccaccttgcctagc

SEQ ID NO: 68 - DNA, 3590 bp, Homo sapiens
ttttttttttttttttttttttttgtggagtttgggtctcgctatgttgcctgtgatcctcccaccttggttttccaaagtgctgggattaagggcatgagccaccatgcctggttaggaatgggagtttaaacaatggttttatttacatatttcattagctagtatttttttcttttttgagacagagtctggctctgttgcccaggctggagtgcagtggcacgatctaggctcattgcaacctctgcctcgtgattctcgtgactcagcctcctgagtggctgggattacaggcgcccgccgccacacccagctaatttttgtatttttagtagagacagggtttcaccatgttggccaggttggtctccaactcctgacctcagttgatccacccgcctcggcctcccaaagtgctgggattacaggtgtgagccatcgctcctggcctcattaactgttttcaaaagtaaaagtacatggataatacaaagttaaattttgtagaatcataaagaaaagcaacaccttcccatcttaactcccctagtgcctctactccctccacagagacaaatatcttaccagttggttgtgttttcttttccaaactgtatttctaaaatgtgtcaatatctcttccttttattttttattttttgtagagacaggggtctcactgtgctgcctaggctggtctcaaactcctggcctcctacctcgacttctcatagttctggcgtgagctactgcacctggcctcccccttattatttttttaaacatgaatggaagcatactatattttctacactttatttgttttatgtaactattttaacaacctgaggacttttacaggctgcataatatgtcttaatatggatgtatcttagtttatttaaacagttactggtgatggacatttccatgtttccagtattttttctcacaaacaatgcagtattatgcctttgtccacattcaccattgattgctattgagtatatctgtagcatcaagaataggcatactgaaaatcctccatgaagtccagtgaagcttcatattattttgaagtgatatttcccagtgttggctggactctcaagcgtttgtggtataggttttgggaggactggacacttccaaagagaaataagatgttacagacttgtccagcaggtggcatcagaacaaagctggctatggaccttgtcagtacaaatgataaaacattaaaaatgtaaaaactcaactgtagctccttgtttatacatatattgggggtgttgaaaagttaccgatgcctgattcctcttctatgtcctcagcccccaccataaaaatagataaatgccatttttttgtatgcccagcacagctatatgatttgaataatcttgataagcagggtcacatttgaggagatttgctaagggaaatgaagatccatctgtgacacaagaaacatgttctatgtgatttctgggattttcctgtgaacatacttcttgtttgtttgttttacagtggatctcactctgtcacccaggctggagttcagtggtgcaatcatagctcactgcaaccttgagctcctgggctcaggagagcctctctcctcagtctcccaagtagctaggactacagacacatgccatcatgccaggctcattttaaaattttttgtagagacgggtctcactatgttgctcaggctggtattgaactcctgggctcaagcaatcctcctgcctcagcatctcaaagtgttgggattacaggtgtgaaccatagtatccaacctattatgtttttttaaaaagagattgttctaattatgtatataattaaagtacattaggtttagtgattgcaatttgagaaaccaatgtcctttcttattgaaaaaggccctggtacagaaagtgttctatcttcctcacaagatctgaggtcaaaggagagattttgaaacattatagcaatggcttctagttattgaataaagaatgtcatttgctcctcacaggacccctttcagggagatttcacatattgggaaacagcctcatgagctttctacaaacatctttgtccttaagtcttcccatttcagtaattggctgtaccactcatccagcagctttcaaagttagaaacctggcaatcttcctttaacatccatttccctttccctcattcccccatatccaatcatgtgtattggaggtttttccacctctaaacttgagaacccatttactttttctccatctcctttgccatcacactagtccaagtgaagtgtttcatcatctcatttgcagcatcctttagtttaccctagattatcaatttttgtccccctcccaattcagtctctactcatgagctaacatgagtttattaagtgttcattctgaccatgccattccttgctcaaaattctctagtgccttcccaatgcccttaaaataaaattcctcatatggcctttgtggatctgcactcctacctcttctcctattgcaaccaaccctgttacctttttctcttttcacactggtcttcattctgtgctgcaaactggctgagattcttccatcctcagggcctttgcacaagttcttcctttgccttagaattctttcctggcctgcacatgtcttcatcccctttccctaagctaatgccttaccctttaggtctcatttaaacatctcttacccaggaaaaatttccctgtccaaacaagtctagattggctccccattgtttgttctaactgttctatatttctccttcttagcatttatcacaattcttggtatgttgtgcttttcactttcttagtcgctattattggagtaggtaatacatccatatagtacaaaattcaaaatgtattaaaggtatagagtaaaaagtcttctcttccctgtccccccgctacccagttctcctctttagaaccacttttagcattttgaatatccttccagaaatattttctaagtatacaagcaattatgtatataatattcctctttatttttgcctttttattaatacagatactatatgcattttctgcactttatctgttaataatatatcttggcaattattcaatattaatatgtaaatagttgcctctttctttttcatgcgccatataatatggacttataatttatttaacctctatctaggttggttttaggcattggttattacaaataatgctgcattgaatacctttgtatgtaaagtcatttcccacatctatgcctatagaataaattactagaattgaaataattcagttaaagattatgtgcatttttaattttggtagttattgccaaactgctctcaatggaagttttatgaattcccactagtgaatgcatttgtcctcacaattatgtcagtgaaatttttgttctttgccaatgcaagaaatggaaagtatctcttggaaactaatttgcatgttttttttccttgcacagttatattttcatatgttaaagagccatttgtatttcttggtgaattgttcataaactttgcttctt

SEQ ID NO: 69 - DNA, 3596 bp, Homo sapiens
ttttttttttttttttttttttttttttagtaagtaagcaaagtttatgaacaattcaccaagaaatacaaatggctctttaacatatgaaaatataactgtgcaaggaaaaaaaacatgcaaattagtttccaagagatactttccatttcttgcattggcaaagaacaaaaatttcactgacataattgtgaggacaaatgcattcactagtgggaattcataaaacttccattgagagcagtttggcaataactaccaaaattaaaaatgcacataatctttaactgaattatttcaattctagtaatttattctataggcatagatgtgggaaatgactttacatacaaaggtattcaatgcagcattatttgtaataaccaatgcctaaaaccaacctagatagaggttaaataaattataagtccatattatatggcgcatgaaaaagaaagaggcaactatttacatattaatattgaataattgccaagatatattattaacagataaagtgcagaaaatgcatatagtatctgtattaataaaaaggcaaaaataaagaggaatattatatacataattgcttgtatacttagaaaatatttctggaaggatattcaaaatgctaaaagtggttctaaagaggagaactgggtagcggggggacagggaagagaagactttttactctatacctttaatacattttgaattttgtactatatggatgtattacctactccaataatagcgactaagaaagtgaaaagcacaacataccaagaattgtgataaatgctaagaaggagaaatatagaacagttagaacaaacaatggggagccaatctagacttgtttggacagggaaatttttcctgggtaagagatgtttaaaatgagacctaaagggtaaggcattagcttagggaaaggggatgaagacatgtgcaggccaggaaagaattctaaggcaaaggaagaacttgtgcaaaggccctgaggatggaagaatctcagccagtttgcagcacagaatgaagaccagtgtgaaaagagaaaaaggtaacagggttggttgcaataggagaagaggtaggagtgcagatccacaaaggccatatgaggaattttattttaagggcattgggaaggcactagagaattttgagcaaggaatggcatggtcagaatgaacacttaataaactcatgttagctcatgagtagagactgaattgggagggggacaaaaattgataatctagggtaaactaaaggatgctgcaaatgagatgatgaaacacttcacttggactagtgtgatggcaaaggagatggagaaaaagtaaatgggttctcaagtttagaggtggaaaaacctccaatacacatgattggatatgggggaatgagggaaagggaaatggatgttaaaggaagattgccaggtttctaactttgaaagctgctggatgagtggtacagccaattactgaaatgggaagacttaaggacaaagatgtttgtagaaagctcatgaggctgtttcccaatatgtgaaatctccctgaaaggggtcctgtgaggagcaaatgacattctttattcaataactagaagccattgctataatgtttcaaaatctctcctttgacctcagatcttgtgaggaagatagaacactttctgtaccagggcctttttcaataagaaaggacattggtttctcaaattgcaatcactaaacctaatgtactttaattatatacataattagaacaatctctttttaaaaaaacataataggttggatactatggttcacacctgtaatcccaacactttgagatgctgaggcaggaggattgcttgagcccaggagttcaataccagcctgagcaacatagtgagacccgtctctacaaaaaattttaaaatgagcctggcatgatggcatgtgtctgtagtcctagctacttgggagactgaggagagaggctctcctgagcccaggagctcaaggttgcagtgagctatgattgcaccactgaactccagcctgggtgacagagtgagatccactgtaaaacaaacaaacaagaagtatgttcacaggaaaatcccagaaatcacatagaacatgtttcttgtgtcacagatggatcttcatttcccttagcaaatctcctcaaatgtgaccctgcttatcaagattattcaaatcatatagctgtgctgggcatacaaaaaaaatggcatttatctatttttatggtgggggctgaggacatagaagaggaatcaggcatcggtaacttttcaacacccccaatatatgtataaacaaggagctacagttgagtttttacatttttaatgttttatcatttgtactgacaaggtccatagccagctttgttctgatgccacctgctggacaagtctgtaacatcttatttctctttggaagtgtccagtcctcccaaaacctataccacaaacgcttgagagtccagccaacactgggaaatatcacttcaaaataatatgaagcttcactggacttcatggaggattttcagtatgcctattcttgatgctacagatatactcaatagcaatcaatggtgaatgtggacaaaggcataatactgcattgtttgtgagaaaaaatactggaaacatggaaatgtccatcaccagtaactgtttaaataaactaagatacatccatattaagacatattatgcagcctgtaaaagtcctcaggttgttaaaatagttacataaaacaaataaagtgtagaaaatatagtatgcttccattcatgtttaaaaaaataataagggggaggccaggtgcagtagctcacgccagaactatgagaagtcgaggtaggaggccaggagtttgagaccagcctaggcagcacagtgagacccctgtctctacaaaaaataaaaaataaaaggaagagatattgacacattttagaaatacagtttggaaaagaaaacacaaccaactggtaagatatttgtctctgtggagggagtagaggcactaggggagttaagatgggaaggtgttgcttttctttatgattctacaaaatttaactttgtattatccatgtacttttacttttgaaaacagttaatgaggccaggagcgatggctcacacctgtaatcccagcactttgggaggccgaggcgggtggatcaactgaggtcaggagttggagaccaacctggccaacatggtgaaaccctgtctctactaaaaatacaaaaattagctgggtgtggtggcgggcgcctgtaatcccagctactcaggaggctgagtcacgagaatcacgaggcagaggttgcaatgagcctagatcgtgccactgcactccagcctgggcaacagagccagactctgtctcaaaaaagaaaaaaatactagctaatgaaatatgtaaataaaaccattgtttaaactcccattcctaaccaggcatggtggctcatgcctttaatcccagcactttggaaaaccaaggtgggaggatcacaggcaacatagcgagacccaaact

SEQ ID NO: 70 - DNA, 5253 bp, Homo sapiens
tttttttttttttttttttttttttttttttgctagaggcacggtctcactctgttgcccaggctggtgtgcagtggcacgatcatagctcactgcagcctcaaactcctgggcttacgcaatcttcctgcctcagcctcctgggtagctgggactacaggcatgtgcccagctaatttttaaaaatttttatagagtcagggtcttgctatgttacccaggttgttcttaaactcctgggctctggggatcctcctgcctgagcctcccaaagtgctggggttcaggcacctggcctgaaaatccctttatgttagtccagagaggcgaggctgcgctgcagtaacaaattcgccgtaaaatcttcggaaatgatcacaaggctttatttcttgctcacgcagttcttggtgagggtcagctgcctctccagggtaggtgacttccctgtgacaagtgatccaggctgtcctggttttgtgacatggcctcccaagggttggcctccaggtccccacagtgggagaagggagagtggacgactctcacccactcttctgtgtctgaaaccggaactgacgcagttaatcccactcacagcccattggccaaaatgagtcacatggccccaacccaaccactgcgggagctgggaaatggagcggtgcctgtggaagagaaggatttctccctttcctaactgatgtggttctggagttttggatagcggagtagtcagactagtgtgttcggtttctaacttcgaactgggtgagtctgggcagtaaggaatgtctgtatttggggagcacaccatttctgccacacctaaaaccatgcaccaagtacatgtgcagatagaacgttctagcactgccattgttccctcaagctttcctgtcccctgattgaaattgttggcttgcactagggactgtggtgtacaaaggtgctcagggaagagccggcgaggtggtgaccattagaatgagtagtagtgtctgggtgcagtgactcatgccccattgaaactgttggcttgcattagggactgcagagtgtgaaggtgcctagtgaaaagccagtaaggtcataaccattagaataggtagtatcagccagccgggcatggtggctcatgcctgaatgatgtcattggcttgcattaggaaccacagagtatgaaggtgcccagtgaaaaactggtgacgttgtgactattagaattagcagtattggctagacgaggtggctcatgcctgtaatcccagcactttgagaggctgagacaggaggactgcttgagctgaagagttcaaaccagcctaggcaacatagtggaactctttctatataaaaacttttttttgttaaattagaagtagttgaggctgggtgcagtggctgacgcctgtaatcccaggactttgggaggctgaggcgggtggattgcctgaggtcaggagttcaagaccagcctgatcaacatggtgaaaccccgtctctactaaaaacacaaaaattagttgggcatggtggcacatgcctgtagtcccagctactggggaggctgacaagagaattgcttgaatgtgggagataaaggttgcagtgggctgaaatcaagtcattgcactccagcctgggcaacagagcaagccgagactccatttcaaaagagtagtagttggatctaccagcgggaatcttaatagggatgtgagatgtgtttagatctcaaagcctgaccctgagtcttaaaatcccaggtcagatcctaagcagtcccagagagctccacctggtgtgcatctgtgccagtgtcttggggtggggcagctgcatgctcaggtggaatccggggctgagttcaagtttaatccactttatgaagaggaggcagagtgaggcataactcctcatccaggggagtggaagtactgtggaaggaagctctgttttgtacctactacgtgctggccctggcctcactgtgcagaactctccacattggaaaggatccccccagaccagagaggcgtaaggagggggctggtgctttccagtgttgaactgttcatctgtcctcacacccaccatcgggtcctacagcaaatttgtttgattttctgcaaaacacccagaatctatccactccccgtcctcccattgccaccacgctggtcccagccaccccactttctccctgcatccctacaacagctgccacagtggtctcgaggcttttgcccccagccccccacacacacatcagtgtcctcaacctggtggctgtagtgaccttatgaaaacacgcactggccgggcacggtggctcacgcctgtcatcccagcactttgggaggccgaggcaggcagatcacctgaggtcaggagttcgagaccagcctggccaacatggtgaaatcctgtctctactaaaaatacaaaaattagccgggtgtggtggcgagtgcctgtaattccagctacttgggagactgaggcataagaattgcttgaactgggaggtggaggttgcagtgagccaagatcacgccactgcacttcagcctgggtgacagagtgagtgactgatggtgaggacacgggctctgaagccacactgcttgggcagagatgccactcattctgtttgttttctcatctgtcaaaagggcctgatggtagtaccttcctcatcaaaacgttccagtaaggggcccagtgaggtggcttcctcctctggtccactgaatgcgtgcgtggcgggcatttaaagcagtgtcaggtatacgtagttacgtgtttgcagtggcgaggtggactgttgagttttaaagagtctactgggcgcaggcactgaccagagaggaagtctgcagccttgatggatgaaattcgtgttccacccaccagccagaccctactggcagcagcccatggcgggggtattaatggcctgggcatcccctctggcgcgtctccagactgccgtggtgtgggcccaacagcagtctcgttagcaggctggcaggtgccggttcccacgtgctggccgcctgtggcccaccctctgctccctggcacacagcctaggaaagagagtctggtggccctgggtcatccccagctgagtttgccaaatgcccacatggcagcccctgcctagggtcactctgcaaggcaggtggctcagctccagccagagaagacaggctgcatctgccgcccttcctttctctaaaggacaaatgtgccctgtgcaatgactttggtattacacccagaaacagatccccactctgtccttactgactgggtcaacttggcaagtcatgtcaaccccttgagcctcagtttcctcacctgtgaaatggagctaggaataggtagttgtgggtccacagctttgcaggcatgactaggggcaggtcaagaatgcggacttcctgccccactttgaaggtggtagaagctgcagttagaagtttactccaggccaaaaggggcatcacaaaacctgtgaggatgggccatcagaaagtcccatgacctgatgggcggagcaggccctgtgtccttaagaaaaggtggagttcttgccctgccacccctgacaccagcaaagccactgctcaagtatctgtggatgatggatggcagcggggcaggttagaccggggattctcaaccaagtgggtctttttgttttgtgttttttcagacagtcttgctctgtcacccagcctggagtgcagtggtgtgatcttggctcactgcaaccttctctgcctgggttcagggcgattctcctgcctcagccttcagagtagctgggattataggcacctgctaccacacccggctaatttttgtatgtctggtagagccaggggttcaccttgttgtccaggctggtctcgaactcctgacctcaggtgattcacctgcctccgcctcccaaagcactgggattacaggcgtgagccactgcacccggcccaactaggtggctttgaccccctgggggattaatggcagtgtcacaagtctggtggcggtagaaggaggatgttattggcatctagtgaagaagaggccaggggcgctgctgaacgtcctacgatgtgcaggacatgtccccacagcacagaactatctggccccacgtgtcaataaggttcagaaagcctgggggattgccttctgtgcttccacgaacacatatccatgtattatgtcattcttgcggcaatgccacgaggtcagtgagactccctgactagcatacataatgttaggatctagggagttgtctaatgtctcacgctgcccttcccagcgatctatgtgtggccttaggcttggctactttagacttagtccctcttttccggtgcctgcagctggtttggtgagtccagtattaatatactgaccgctgtcagaaagaggagtgaggaggctgggcatgatggttcacgcctgtaatcccagcacttttggaggccgaggtgggcagatcacctgaggtcaggagttcaagaccaacctggccaacatggtgaaaccccgtctctagtaaaaatacaaaaataattagccaggtgtggtggtgggtgcctataatcccagctacccggcaggctgtagcaggagaatcgcttgaacctgggaggcagaggttgcagtgagccgagatcttgccactgcactttagcctaggtgacagagtaagactctgtctcaaaaaacaaaaaaagaaatgtgtgaggaatgcaacaagctgtgcattgaccacccttggttacagcaagttctccacgctcagccgggtccagcctttggctgtcagcagcatctggagcggaactgtgaacagaaacactccaggtgttccgacgggtgctggggcgcccccagggagctggaatttggtttttagcaaccacatataggaaatgaacccgccagccacagtatctcacgcctgtaatcccagcactttgggaagctaaggccagcggatcacctgaggtcaggagtttgagaccagcctggccaacatggtgaaaccccgtctctactaaaaatacaaaaatcagctgggcgtggtggtgggcgcctgtaatcccagctgctccagaggctgaggtgggagaatcgcttgagcccgggaggtggaggttgcagtgagtcaagattgcacccctgcactccggcttgggtgacagagtgagactttgtctc

SEQ ID NO: 71 - DNA, 5251 bp, Homo sapiens
ttttttttttttttttttttttttttttttcgagacaagtctcactctgtcacccaagccggagtgcaggggtgcaatcttgactcactgcaacctccacctcccgggctcaagcgattctcccacctcagcctctggagcagctgggattacaggcgcccaccaccacgcccagctgattttgtattcttcagtagagacggggtttcaccatgttggccaggctggtctcaaactccgacctcaggtgatccgctggccttagcttcccaaagctgctgggattacaggcgtgagatactgtggctggcgggttcatttcctatatgtggttgctaaaaaccaaattccagctccctgggggcgccccagcacccgtcggaacacctggagtgtttctgttcacagttccgctccagatgctgctgacagccaaaggctggacccggctgagcgtggagaacttgctgtaaccaagggtggtcaatgcacagcttgttgcattcctcacacatttctttttttgttttttgagacagagtcttactctgtcaccctaggctaaagtgcagtggcaagatctcggctcactgcaacctctgcctcccaggttcaagcgattctcctgctacagcctgccgggtagctggggatcataggcacccaccaccacaccctggccaattattttgtattttactagagacggggtttcaccatgttggccaggctggtctcgaactcctgacctcaggcgatctgcccacctcggcctccaaagcgctgggattacaggcgtgaaccatcatgcccagcctcctcactcctctttctgacagcggtcagtatattaatactggactcaccaaaccagctgcaggcaccggaaaagagggactaagtctaaagtagccaagcctaaggccacacatagatcgctgggaagggcagcgtgagacattagacaactccctagatcctaacattatgtatgctagtcagggagtctcactgacctcgtggcattgccgcaagaatgacataatacatggatatgtgttcgtggaagcacagaaggcaatcccccaggctttctgaaccttattgacacgtggggccagatagttctgtgctgtggggacatgtcctgcacatcgtaggacgttcagcagcggcccctggcctcttcttcactagatgccaataacatcctccttctaccgccaccagacttgtgacactgccattaatcccccagggggtcaaagccacctagttgggccgggttgcagtggctcatgcctgtaatcccagcgctttgggaggcggaggcaggtgaatcacttgaggtcaggagttcgagaccagccctggacaacaaggtgaacccctggctctaccagacatacaaaaattagccgggtgtggtagcaggtgcctataatcccagctactctgaaggctgaggcaggagaatcgccctgaacccagcagagaaggttgcagtgagccaagatcacaccactgcactccaggctgggtgacagagcaagactgtctgaaaaaaacacaaaacaaaaagacccacttggttgagaatccccggtctaacctgccccgctgccatccatcatccacagatacttgagcagtggctttgctggtgtcaggggtggcagggcaagaactccaccttttcttaaggacacagggcctgctccgcccatcaggtcatgggactttctgatggcccatcctcacaggttttgtgatgccccttttggcctggagtaaacttctaactgcagcttctaccaccttcaaagtggggcaggaagtccgcattcttgacctgcccctagtcatgcctgcaaagctgtggacccacaactacctattcctagctccatttcacaggtgaggaaactgaggctcaaggggttgacatgacttgccaagttgacccagtcagtaaggacagagtggggatctgtttctgggtgtaataccaaagtcattgcacagggcacatttgtcctttagagaaaggaagggcggcagatgcagcctgtcttctctggctggagctgagccacctgccttgcagagtgaccctaggcaggggctgccatgtgggcatttggcaaactcagctggggatgacccagggccaccagactctctttcctaggctgtgtgccagggaagcagagggtgggccacaggcggccagcacgtgggaaccggcacctgccagcctgctaacgagactgctgttgggcccacaccacggcagtctggagacgcgccagaggggatgcccaggccattaatacccccgccatgggctgctgccagtagggtctggctggtgggtggaacacgaatttcatccatcaaggctgcagacttcctctctggtcagtgcctgcgcccagtagactctttaaaactcaacagtccacctcgccactgcaacacgtaactacgtatacctgacactgctttaaatgcccgccacgcacgcattcagtggaccagaggaggaagccacctcactgggccccttactggaacgttttgatgaggaaggtactaccatcaggccctttgacagatgagaaaacaaacagaatgagtggcatctctgcccaagcagtgtggcttcagagcccgtgtcctcaccatcagtcactcactctgtcacccaggctgaagtgcagtggcgtgatcttggctcactgcaacctccacctcccagttcaagcaattcttatgcctcagtctcccaagtagctggaattacaggcactcgccaccacacctggctaatttttgtatttttagtagagacaggatttcaccatgttggccaggctggtctcgaactcctgacctcaggtgatctgcctgcctcggcctcccaaagtgctgggatgacaggcgtgagccaccgtgcccggccagtgcgtgttttcataaggtcactacagccaccaggttgaggacactgatgtgtgtgtgggggggctgggggcaaaagcctcgagaccactgtggcagctgttgtagggatgcagggagaaagtggggtggctgggaccagcgtggtggcaatgggaggacggggagtggatagattctgggtgttttgcagaaaatcaaacaaatttgctgtaggacccgatggtgggtgtgaggacagatgaacagttcaacactggaaagcaccagccccctccttacgcctctctggtctggggggatcctttccaatgtggagagttctgcacagtgaggccagggccagcacgtagtaggtacaaaacagagcttccttccacagtacttccactcccctggatgaggagttatgcctcactctgcctcctcttcataaagtggattaaacttgaactcagccccggattccacctgagcatgcagctgccccaccccaagacactggcacagatgcacaccaggtggagctctctgggactgcttaggatctgacctgggattttaagactcaggtcaggctttgagatctaaacacatctcacatccctattaagattcccgctggtagatccaactactactcttttgaaatggagtctcggcttgctctgttgcccaggctggagtgcaatgacttgatttcagcccactgcaacctttatctcccacattcaagcattctcttgtcagcctccccagtagctgggactacaggcatgtgccaccatgcccaactaatttttgtgttttagtagagacggggtttcaccatgttgatcaggctggtcttgaactcctgacctcaggcaatccacccgcctcagcctcccaaagtcctgggactacaggcgtcagccactgcacccagcctcaactacttctaatttaacaaaaaaaaagtttttatatagaaagagttccactatgttgcctaggctggttccgaactcttcagctcaagcagtcctcctgtctcagcctctcaaagtgctgggacttacaggcatgagccacctcgtctagccaatactgctaattctaatagtcacaacgtcaccagtttttcactgggcaccttcatactctgtggttcctaatgcaagccaatgacatcattcaggcatgagccaccatgcccggctggctgatactacctattctaatggttatgaccttactggcttttcactaggcaccttcacactctgcagtccctaatgcaagccaacagtttcaatggggcatgagtcactgcacccagacactactactcattctaatggtcaccacctcgccggctcttccctgagcacctttgtacaccacagtccctagtgcaagccaacaatttcaatcaggggacaggaaagcttgagggaacaatggcagtgctagaacgttctatctgcacatgtacttggtgcatggttttaggtgtggcagaaatggtgtgctccccaaatacagacattccttactgcccagactcacccagttcgaagttagaaaccgaacacactagtctgactactccgctatccaaaactccagaaccacatcagttaggaaagggagaaatccttctcttccacaggcaccgctccatttcccagctcccgcagtggttgggttggggccatgtgactcattttggccaatgggctgtgagtgggattaactgcgtcagttccggtttcagacacagaagagtgggtgagagtcgtccactctcccttctcccactgtggggacctggaggccaacccttgggaggccatgtcacaaaaccaggacagcctggatcacttgtcacagggaagtcacctaccctggagaggcagctgaccctcaccaagaactgcgtgagcaagaaataaagccttgtgatcatttccgaagattttacggcgaatttgttactgcagcgcagcctcgcctctctggactaacataaagggattttcaggccaggtgcctgaaccccagcactttgggaggctcaggcaggaggatccccagagcccaggagtttaagaacaacctgggtaacatagcaagaccctgactctataaaatttttaaaaattagctgggcacatgcctgtagtcccagctacccaggaggctgaggcaggaagattgcgtaagcccaggagtttgaggctgcagtgagctatgatcgtgccactgcacaccagcctgggcaacagagtgagaccgtgcctct

SEQ ID NO: 72 - DNA, 2911 bp, Homo sapiens
gtgtgtgtgtggtttctaccggggagacaggcgctctgggctccttccccggcggccagaggcctcgccggccagtgcgcacgcggcgccggttcccgaccaaggctccggcccgctctgctggctcgtttgaaacgtcgacattctcagcgcacgatccggggtctcgggggcacccatggggcccgaagcctctgcctgccggcggcgaccggacagctcccccgggcgcgcagggtagaggaagcgccctcgaaagcccccgcacgcattcacgagccggccctgcgcgggcacagcggcagccgcggcgggacacccggcagggtcttcggcgctactttgtgccaaaaactgcgctcccggagacccgggcaccgccggcgtcggcagctagagcgggacccagctcccaccgcgtcctccactggagcccctttcggcccctcggcgagtgcggcccgtggggagtgggcgtcggcgcgaggaagttccccggcccgggcgaccccggcttctgagcggcccctccccacgtcgccgcccgccaggccgacggaggaccggggcggggacgggggtctcagcggcccattctgctgtcacttctgacctattctccagcaacggcgcgtccccccctcggctttttcgcgaggtttgttgaagacggatttagcccccgcagagctggggaaggacggatggacggaaggcccagcgcggcccaccccttcccctcgtcgtctcccggctggcaggagccgcagcgacagcttcggggagcggggcctgccccaagacccccttcgcggcatcgggagccaggcgtggccggaggcaccgcggctgctccacgtggctcccgccggccgccaccccgcgcggggaggacgcgtgcgtgcggtgcgtggccggcgggctgcggggacgcgcttgaaattaaatcttcgcagtgcctgaccttgttttttcctcggccctgataactgcagcagctgttttttccagaatccctgctgctgggggaggggcgttattattatttttggttgtcacaacctcctggaaaaattccctggcctcagaaagtgtaacaatggcctggcggatttctggaggaagcgccccctcctctgctttctgcggggacacttctgccctcgagctgcagtggggacctcctcccctgctctggccctatagccccctccccggccttcagagccttacatcaggctcctaagtacgtggccttggggtcctgcgggccccttctgcttgccgtccctgcccctggtcacgcctgggaaaggttgcagctctgaactggggagaagcttatagtctccagcacgaatgaggcttgaggggcacgaggcagaggcctggacaccccacccacctggagccagtgaccctcacccagtgcctcctttaagacaccactgcaggctgggtacggtggctcacgcctgtaatcccagcactttgggaggcaggcggatcactaggtcgggagtttgcgaccagcctggacaatatggtgaaaccccatctctactaaaaatataaaaattaagggccgggcgcggtggctcacgcctgtaatcccagcactttgggaagccgaggcgggcggatcacgaggtcaggagatggagaccatcctggctaacacggtaaaaccccgtctctactaaaaatacaaaaaattagccgggagtggtggcgggcgcctgcagtcccagctgctggggaggctgaggcaagagaatgacttgaaccggggaggcggaggttgcagtgagccgagatcacactactgcactcaagcctgggcgacaaagtgagactccatctgaaaaaaaaaaaaaagacaccactgcccagccgtacttggaagacatgtctcctccccaggaatcctgctgtgtttgcttttggggtcagtgctagtccagaagcagttaaagattaaccggcctgggccctggggtagaagaggaggctgaggagggggaggggaggggaaggggctgcagcacaagtggtgcctgattcctgggccattccctggcagccaagtggctgctgggctctgcacacagcccatcccccccagtgctgctgcccgcgttccagcttgcccccacctgccaggctgtgcagtgggttcaggtgggaagcagttgctgggcccacctgtctggcaagggcagttggggagccctggctgcttagcacaggggtgaccccagcttctggctcacacatccctgcagactgtgggtgcttagtgtggaaagaggaaggacctctgccctcctggcccttcctccagtgggacgagaagcccaggaaagaggctgaacccaggaagggctctgggcagcctggccgctggtctcgcagtgtgtggctggtcttggcctcctgttctgcttccctgtcacgggggtccagggtgtgtgtgtgtgtgtgtgtgtgtgtgcaccatacagccaatcctgcgcctgcatctccttctcctgcatgggccctccttgatcaggaaggggaggcaggaggatctcagcccccacctcattctaccccagtgggagtggcctcttcatgtccagttggtcccaggatcccctaacccatcatcatcctgggaggaaggcagtggctcctcccagcagagagctccaggacccgccctgccctgtgggcggcagggccctcctcctaagcccctcttcctgcccataaatgtatttacacttgtattaccccaggtacgtggctgtgacaatggcatccccagcctgcatggaggacaggaattgaactttagtctccaggcaatgaaggtgcagggactacactttattaatggttgttatgtaataaaaacgataaaatg

SEQ ID NO: 73 - DNA, 2632 bp, Homo sapiens
cctcccgcccgggctcctgcccggacggcggccgccgccgcctcgtcttccccgagggctccgcgtccgtctccgcagctcggccgggaacctgggaactcggacgcagaaggacgcgcccgagccaggacccgccgcggggtccctctggtgggccgtggccggggagaggacgcgggccctggcggtcgaagacggacgcagcgcccggaaaggcgagccaggtctccggctcctggcgcttcctgtgagctggctcggcggggtgcgtcgccggggagggagggactggccgtggggcgagcagccgggcggggagtggcttctgggggccttcgccagcggagggcccgcgaggccgccctcggagcgccgccaggtacgtgcgttttccttgtttcccgcgctcccagagcgcactctcggtagggaacgaataaaatcccggctggtgtgtaagagcctttcgctgcaaacgtgtctttctgcgggattcggggaggccgccgaacgcggggtagaccccggcccaaagtgttcctgcagcttccacagggacccttctccaccctcaccttgggctcggagcgggtgccagttggaaatgcttgtctcttctgcagctccgattgaattcgcccaggaggaggtgcgccctgcctcggcctcagagctgggaggaccgggctttgttccccgaagctctcccaccccgtcctcctggaaaatgcggattttttctagtagggatgctcagttttgagggggttgttttcggaggaagcttgggttgggaaagcccgatattggccccaatctggcgggcagcttcccttgtcttggagcagcccctcctagcccccggagccccggacttacacggttaggagacgcccatgggctttgggggtattctgcggggtccgaggaggccgggtggcctgggcggggtccgaggaggccgggtggcctgagcggggtccgaggaggccgggtggcctgagcgggggtccgaggaggccgggtggcctgagcgggctccttcccctcccccatgtgcacgtcaaacaaaagaatcttcgaacagttttggggacagaactcttcggaatgtgagcctgtcctccccgccccccttcctaggaaggacaggggtctttcaacaaaggcaaggctgcggttggagcgggctgaagggaaggagcgctgttattttggggtacttgatgaaagagaaactcactttctctttctcctcccaaaattagaggcagctgagtcagagctctccctactttcttacctgattaatggggtttcacacgatgtttgcatttggggtgactgggtttgaagactttcagaagtgggaaaggatcctgcttgtgtgggagattggaaagctggcctccacccggtgggggatagaacccctatggagtgaaatggattccaggccattttgcggaagattggaaatttaaggatttgacgggggggcggtgattttgtgtccttttctctcccccctcccccctccccagtttagaacaaagggcggaggcgaaggaggcaagatggggtggtgggctcggaagccggagtcgaaagaagaatgttataaaagtccctcacttcccagtccccgcgcacactcccaaatagctcatcagagtttgggtggggacaaagtgaatgaccgcctagagtcgggtttggtacccatggcccggttttcggcgcgggcgtccggagccgggggaagctcctccagctcgtcccaagtcgcggttggccagggcgagagaggtcggggcacagcgcgcggtttctcctgccgccttcgaggaccgagactcggggttcgcggctccctgactgcgcaagtctcctcgcccctcctgctcccccctcccccccgccgaaagacgctcggagcgcacacccgcctgcaccaaagccagggatctcatttctctcaaaataaaactcaacaagccataaaggctcctgattccagtggaaaaggcgccgcagattatggtccctccaaatccccacactctaattatccctgtttttagtttacttatgggtggtgaccaataaaatgattttccattttgaatttttttttcaacataaaaaatgcaagcttcgcttccctcttacccgcttggatggatcttttccgtgcgggaagcaaagaaatcccgtttccctcggccttatcggcccagggctgagctgctgcctccggttgagcgaacccggcctgccgcagcaccccccaagcacccccgccccgcacacccttaattgcaatttaagggagaatattctttccgtcctcatcttcgcccaagggcatttgcagggacccctccctagaagtcctgtcgtgggcctagcggctagaagggccaccccgcagagcgggtctccgacagcccccagcccggtcaccttttcaaactgccgccctcctgggccccgcattgggcgcgagcctggggcgcccaagggcccccactgaggaggaaggttgccggaccgagccctcgccaccgcttggcgccccatcccccatcccctccctttgttcgcctttcggacgccgactggagatggc

SEQ ID NO: 74 - DNA, 5951 bp, Homo sapiens
tttttttttttttttttttttttttgggagagagtctcgctctgtcgtccaggctggagtgcgtgcacaatcctggctcacagcagcctctgcctcccaggtttaggcaattctcctgcctcagccccccaagtagctgggattacaggcacccaccaccatgtccagctaatttttgtatttttagtagagatggggtttcaccatgttggccaggctggtcttgaactcctgacctcaggtgatccgcttgccttggcctcccaaagtgctgggattacaggtgtgaggcactgtgcccggcctattcctaaacactttgtaaagtttcagatgtggcaaattttcgattttctaacttcagtgaaaaataccactttgcattcttttaaatatctagttgtacttatagcagctacaaaattgtattttatcttaaaatgcaggcttttccagaggaactattttagaattacctgtttttgctagacagctgtggcacattttaaaatgcacttataaagatatctgatcttactacctttggaaagtattttgataataaacacacacacacagggttttagttatgtctgagacagactgtaaaggaaatggtaaatgatataatgttgatgaatgatggaaagctcagctatccaattcctattacacttctactttttctgggaaaaggcagaacaaaagctggcaagaaggaatcaacggtctgaatgggtgaagggattctagaaaaaaaacacagttactataagtatgttacaatatcctggcctggattagtttcttccagagaactaagagtctccaaataaagtctctgcaggttgtcatcagaggtgctgaggcaaatgaaaggcaggctggaagaccagagagaggtgattcttatctttaaataaggggagtcaggtggttccacaacctgcagactgatgaacttgacatcatcctgggcagcattctgcaatggattattaaaggtagggcctgtgagtatttaggggagaaagtgtaatctccaggaaccagcatgggttcaccaagaataattcatgtcaggttaatctttttttttcatagaataagtgggagattgtggaaatatgtgaagcaatctagattttagaaggacaagcaataagggtttcatgacttttgtgggtagacaggagaaatacaaatgaattaattattcattcatttaacaaatattgggttggtgcaaaattctggtttttgacattagaagtaatggccaaagctgcaacgttgcaccaatctaataaatacctgctctgtatgaagcactatcctaggcactgaggataaaacagcaaatgatagatatggtctctgtcctcagagtttctcaagagggacagtcaaacccaaaagcccaaataaatatgtgcaagtctttgtaatacagactataaagaaaacagaggcagggcagagataagagaatagggggcaatctcctttaaatggcgtgagcaggtctctctctctgaggaggtggcacttaagcttaggtgtaaagaatgaaaggaatctaccttgcttcaaggaacagtgggaagatgacagtttcaagaggggtagcatgtgcaaaggccctgaggtgggaaagatactggaatgagggagctttgaaaggcggccagtgtcaggagagtggtgagtaagggggatagttgtactagattaaggttggagaaatcggcaggggcactccccaaataaactgcagaagatgaatgaaggagattctagtggccagttctttcagttcttttaccaatggtttagaatccattttttatcagttatgtatagcctattgttttgaaatacaataaaagagaacaaaacattgaaagaaatgttaatttggttgatacaattagaattcaaagagcaaagtatagtggatcagcacttaggctctggcctcagaccagtgtttgaaaactaggtctaacattctctatggccttagacaagttatctaacccctctaagccaggtaacaaagacaatataagggctggcacagtggctgacacctgtaatcccagcactttgggaggccaaagtgggcgggtcacctgaggtcaggagttcaagaccagcctggccaacatagagaaaccccatttctactaaaaatacgaaaattagtcgggcgtggtggcgcacacctgtaatcccagctactcgggaggctgaggcacgagaattgcttgaacccgggaggcaaaggttgcagtgagccgagatcatgccactgcgctccagtgtgggtgacagagggagactctgtctccaaaaaaaaaaacaaaaataaaaataaattttaaaaaaattcaaagcagttttcatacttagtaaaattgagaaatgagaaaaactacaattataatagtgttttggggattaaattcagtaactctctcttaagatttaagattgtgccactttttctcagcacttttgtcaagtaaaagtttttttgatgttgctttttttttcatgttcctattttctcacgtaagcatagttagcagtgatagttttccttatttgatcaaatcttatattttttgcattaaaatgtgccttttaaaaagttatccataattaaaatgttatccatagaaaagtcatcctattttctccatgtaagcagttagtagtgatgaagttttccttatttgatcaaatatttattttttgcattaaaatgtattctaaaatgttatccataattggatatccataatatccaatatacatgttttactttactgtaagtttacgatttactttactgttggcttatgatttgcttaaatttggagaaactatgacatatttaactagaagtctcctaggcatgcgaactgcttgtttttccttactgaaaattatgctgatttttcttctgcatgtgctcctgtttgattccagtgctagcgacctgatctaggcaaatttcacaggacttcctaactccaatccctcttggttatacgctatcttacacctgctgccataatttctaattcttccttgctgcagagcctagataatttcacactgttcagtccagtgtatgctacaatcacctgattcctccacctcaatcctgctcctcttctgttgctacctgccactctacttctgcacctggcctctccatcatcttctgctaaatgaaattctcattctcgtgataaaagaaacccaataccttcccaatcaaccctactccacttgggtcacttttctgttttttccttatcaccagtgaaaccagtttttacttaattactttatttccacatattctcataactatacatttacataattgcctacatccccaccagtttataaacttagtcaactaagggtcttaatcttctactgaaatcctatttcaaaaaacccttcagtaactgactcaagatgtacaactttatcttcatgtgattttttttaactgtcaaaaatacatgaaaaaatatgaaagagaatgtaccaaatattaatagcagttacctctggaaaatttcaaaacgggagttggaaagggcaggggtagtgttggtggtagtaatgtacctcaatatatacccattacctaaaactgtgactggcacatgggtcttcaaattaatatttgtggaatgaatggtcagagtctaaatattcagtcaacagtatgaacattttttcgtaggttcttttataatctttagtacttcttgaatattccataatgaacttggatttatcatataaaaactcaaactaaaaaagatacacaagcaaatttgacatggaaagcatgacaaccaaatttgatgtgggtagtatgaagattcagcgcaaggtttgattccagtatcttaaaagtttttggaagacaagtcctctatcgaaagcagatggcttttaaaaacaactaatgatacagaatcttgaactgacaaactaagagaaatgttgtcgtaattatttcctccaaagaaattcttaatcccatgcaaaatccctagctgttgcataccgttctgtggcttcaaatactatcaatatagtgactccccatttcatttttagtatttttttagaggaaggaactggctctgtctcaagtgatcctcctgcctcagcctctcaagtagctgagactacaggcgcatgccaacccacccagctaatttttattttgtagagatggggtcttgctacattgccccagctggtctcaaaatccggggctcaagtgattcttctgccttggcctcccaaaagtgctggggttacaggtgtgagccaccatgcctggcctagtgattccacattttaattttctccccttaacactacactcatatatccaactgcctactatgcaatgtctctgttagaattattaataggaatctcaaaactcaatcacccttctcacaccaaaaactggagtcatcttttgatctttttcttcttgttcacatctaatccatcgccaagtcttatcagctttaccactaaaacataccccaattctgacttctccccatgactatcaccctagtccaaggtcccaccatctctcacctggatgactgtaaaagtcttccttaccttgttccactagccttttctccactgaccagagaaatttacaacacaccacacatctcctttgcttaaaactctccaatggcttcccatcacactcaaaacaacatcttaaatccctcactataggcttatagccctaaatggtcaggcccttgccaatctctaaaacctcatcacctactattctccacactcaatggacttaccttactggcattctttctttctcagcgagtaattccatatgtgctttggggactagttttattgttctcttcatctcgaacgtttgttctttggtcttggtctaattttcttatatcattcaaggttacgaccctataaaattgtgccccagtccctccaccaccatgttctgcctcattttactcatagcttcggaaattaccatttcattgctgtcttatctactagaattcaataaactctggaaggcagtaaagctttgtcttataccccaatgtacacccattactgaaaatagtgagtggcacacgggtcttcaataaatatttgttgactgcatggctgaagagagtctcaatgttcaatcaagcgtccagggcatgaaaacaaaacagttgctccaactcatctatactttgcaatagcaacctctcctcccgtcccccacaaataaccagctacctcccacaaaaattccaccccaaacctctttagaatatactattttaaaagcctatgttctggatcagctgttgcaaaattataaaacaaaccagagcctcaaaaatatgtagcttgtatgcacacgggccaagcagcattgccctctttcgaaactttctcacccttgagtcagcccttgctatgcatttctatctaattcatcaaagtaaaactgtatgtgctggggtacaggtaagcaaacaaactggtgctatttgctctatgttaacactctcaaagacagacctggctctgcatccttcttaggagggtcctatggccaggcgcggtggctcatgcctgtaatcctagcactttgggaggctgtgggtggatcacctgcggtcaggagttcgagaccagcctggctgacatggtgaaaccccgtcactactaaaaatacaaaaattagccgggcgtggtggtgggcgcctgtaatcccagctactcaggaggctgaggcaggagaatcaccttgaacctgggaggcagaggttgcagtaagccaagatcgggccactgcactccagcctgggtgcaagagtgagactctgtcg

SEQ ID NO: 75 - DNA, 3112 bp, Homo sapiens
agatcttcgcatagcgggcagcggccggagcgtttggaggactctgcgtggacttggagctcacagcgtcttgcgacttggaagcggattcagaggacaggacagaacacttgggaaacttgcttcccttcttcctgcccttggacatgagactccaggttcttatgcgtttggactctgggacttgcaccagtggcttccccgaggctctcaggcccccggcctcagactgaagactgcactgcgggctttcctggttttgaggcttttggacttggactgagccactactagcttctctctttccctacctggcagacagcctgttgtgggactgccttctaaccgtgtgaaccaattctctctgggagcttatagcttcattgcactgtgtgtggcatttgggtcctgtttgacagcaatgactgcctttctgtttagtgtctgtgtgctatgaagattgcacacaggggtccagatgcatcctgttttgagaatgttaatggatacaccagctgctgctttggatttcacccattggtggtagttgacccgctgtttggaatgcagacaatttaagtgaagacatatccatatatgtggctctgttacaatggtgaaatctacaaccataagaaggtgcagcaccgttttgaatttgaataccagaccaaagtggatggtgacataatccttcatctttatgacaaaggaggaattgagcaaacaatttgtatattggatagtgtgtttgcatttgttttactggattctgccaataagaaagtgtccctggacagagatacataaagagtcagacttttgtttaaagcagtgacagaagatggattttggctgtgtgttcagaagctaaagaattgtaattgttccttatgtacgccagacacaaatcccttgtgttcatcagggttgcaggattcaagatcaatatacaaaaatcaatagtatttgacacactttaactgaatactacatactcacaatgagcaatcagaaaatgaaattaagaaagcaactttatttatcatagcatcaacaagaataaaatactgatacatttaagaagtgtaaaacttgtactctgaaaactataaaacattgttgaaagaaatgaaagaagatctaaataaatgtaaaagtatcccatgatcatggacctaaggcttaacattgttaagaaggcagtactccctaaactcatctacagatttaacttcatccctgtcagaatcccagatgagttctctgtaaaatcggcaagctgactctgaaattcatatggaattgcaagggactaagaatagccaaaataatcttttgaaaatgagaaacaaagtagaagaactcatacttactgactttaaaacttactacaagacaatggtaatcaggacaatataatactggcagaaggatagatgtatagaccagtgggatagaattgagagtcagatatgaacccatacatatataaccactgcttttgacaagagtgccaagattattcagtggggaaagaagtttgagaactggcacaaggacaactagatatgtaaacatatgcaaaacctggagtaggacctttacccaacaccatatacaaaactatgggtgcaaagtaattggatcaaatggatccattttgagctaatccacataaatgtaaggactaaaactataaaatcctgagaaacaaacatagaagtaaattgtcatgaccttgaatttggcaaagttttcttaaatatgagaccagcaacaggaataaaaattgatgaactagacttcatcaaaattaaacatttttgcacttcaaaggacaccatcaagaaagtgaaaagacaactcacaagatggaagaaaatacttgtaaatcatgtgtagcactttttgatgataaacttgaggaagacttttttattttttattttattatactttaagttctagggtacatgtgcacaatgtgcaggtttgttgcatatgtatacatgtgccatgttggtgtgccgcacccattatctcatcatttacattaggtatatctcctaatgctatccctcctccctccccccaccccatgacaggccccggtgtgtgatgttccccatcctgtgtccgagtgttctcattgttcaatttccacctatgagtgagaacatatggtgtttggttttctgtccttgcgatagtttgctcagaatgatggtttccatatatatatatatatatatatatatatatatatatatagtcagttgccaggactgctgggcaagcctgggaaagagagtacctggggaaagcagcctcctgctcccccgtgccttctttgagcctgatgttcatttgatgtggtactatataatcacatccagtttaccctttgaaaaatccttgatttttcttttctatatccttgacactgtcattttacagaccacataatcttatctggaatactacaacagttttcttttctcagtgcttttagaataacctgtcaaaaactcatctgactatagtagtacctgcttacaaccttttaattactccccattccctaccaggctgtgtaactcacttgagctctgctaggtggtgagggaatctgggtcctttttctggtatttaaattcagtgctacgtaggttactggctgggttgaaaatctcaaattgtaaatcatgagtatatatgtagatagtctgtcacgatttacaataaaacattgacatgtcagagatcatggtgatgtgaggttgggtactgtctgtgagaattaattgaggaaatttaaattatatggttttatttacatagagtgtataacaactagttaagggatagatgtcttcttatctgactttcaagtatctaagagtggattattgtgcttgttaaagttctgggaaccatggatattttctgaaaatacctcagtgatgacaaatgaatgactaccagcctctcataacattaggactccagttcatccctttgcttcataagtgtgtcttttccttttgtatatatttgctttagtgtagaaaataggttttcttgattagaaatctaaaaagaataattg

SEQ ID NO: 76 - DNA, 3857 bp, Homo sapiens
agtggacttaggggcagttgggaggactccctaaagaaaatctgggtgctgttccttcaagatgagagcatgagactgagatgacagtaaccctgcaggcctaggtgggagcttccagtgcctcttgtcatcattctggtatgtccaggaagtgggaggtggcaccaatgtgtagccaccctgcctgagcccaccagccttggagtcagaacaccctggggtaaatcctggctcagctcttctcagctatgtgatctcggggctagaccttccagtatcgtgtagaataacagcggtgagacagaacatccttgtttccgtcttaggaggaaagcgccattaggaaagcatcataagaggaaagcagtctttcaccattacgtatattagctgtggatttttgttttgtataattgttttacatgttctttatcaagttgaaataatttgcactatttatgacttgctgggagacttaatgagttttggattttgtcaaatgctttctttttgcatcaattcatatgattatatgcttttctttccttggcttgttgatatggtggattgattgatttttgaatgttgaactaccatagctgtaataaatctaacttgataatggtgaataattatttttatgcattgttggattggcttgcttatattttgtcaaggatttttgcatcagaattaataagagatactggtctgtaattttctttctttttatttcgtctcataatattggcctcatgaaatgaattgagaagtgtttcctctgcttctattttttggaggagattgtgtaaaattggtgttgtgtttttcaaatgtttggtagaattatccagcttggagcattttaattatgaattcattattttaatgaatttttttttttttgagacggagtctcgctttgtcacccaggctggagtgtaatggcgcgatcttggctcccaacctccacctcccaggttcaagtgatgctcctacctcagcctcctgagtagtgggattacaggcatctgccaccatgcccagctaattttgaatttttagtagagacagggtttcaccaggttggccaggctggtctcaaactcctgacctcaggtgatccaccagcctcagcctcccaaagtgctgggattacaggcatgaaccaccgtgcctggccattttaatgattttaggactgaccaaactatctgtttcatcctggttgggttttggaagtttttttttattttttaggaattgtttcatttcttctaagttatcaaatttatgagcatcaatgtatttacagtatttccttattatctttttaaaggctacaagatttatattggcattccctgtttctttgtggtactagtgatttgtatcttctttttgttttccatcttgctagaggcttatcaattttatttattttttaataaatcagcttttttgcagtttttctattgtttttctgtttttgattttatttatatctgccctgaattttactgtttctttccttatgctagctttgaatttatgttgctcttgtttttctagtttctagaggtactaacttaaattgctaatttgagacctttcatcttttctagttaagcatttagtgctataaattttcctctcagcattacttttgctgcatcccacatattttgatatcttgtatttttacttttatttggttttatgtagtttttaaatttccctttaaacttcttctttgagccatagattatttagaagtatgttgtttactttccacatgtttagagattttctgcctttatgctattgatttgtaggcttattccatttttgtcagagaacatactctataattataattcttttaaatttgctgaggtttctttcatggtccaggatatgtctatgttggtatatacttcttgggttcttgaaactaattatattctgtgttgttggttggagtattttatacatgcctattagataccgttgtttaatggtgttgttcagatcctctaaatcctcactgattttctacctagtagttcaattgattgttgagattgggttgtttatgcccctgactgtaattgtggacttgtctatttctcctttcagttttattagctttagctttacatatttaagtctctgttgcttggtgcctgcacatttaatattgttttgtcttcctagtggattgatccttttattcttatgtaatatccctctttgattctagtaaatttcatggttctgaagtccactgtatctgatattcatttagccacttctatttttttaaactaaaatttgcataatatatcttattatatcgcttactttcagccacctaaattgttgaatttgaaatgagtttatcataaacaacatatataccctgccaatctgtcttttgattgttatatttaataatttaagattgtcaagatgacaggtgttgagatggtcagttaggacaataagccaaatgaaattaatagtcaagactttgttcacttactaggatagtgaagtccagagacaaagaaaaaaaaatgtgttggctttccagtgttccattttcccccataggacagcatcaggtgaaggtcaggaggatcagtgaagacaggaagattatctcactaacaaggagccctgaacaagaagctactgccattttagaatttgtttttccatttctgctaaaaatgccattcggattttgataaagattttattgaatgtttagatcagtttgaagagtgttgtcatttaaaaaatattaggtcttctaatccatgaacatagtatatctctacatttatttatacattttcatgttttccagcaatgttttgtagttttcagtgtacaagtcttgcatttcttttgttaaatttatatctaattattttattattttcaatagtattataaagagatttggtttttaattttatgttcagattattcattgctggtatataggtatacaaatatttttgtatatttatattgtatcttacaactttgctgagcttgtttattagctctaatagttttttgtgtattccttagtatcgtctatatgcaagatcacgtcatatgcatatagaaatggttttacctctcccttttaaatctggatgccttttagcttcttttattaccttattgcattggccagagcctccagtacaatgctgaatagaaatagtaataatgggccttcttgtctagttcctgatcttaggaacaaagcattcaatcttttttatttacttatttatttatttatttatttatttttgacacaggttctcactctgtcacccaggctggagtgcaatggtgcaatattggctcactgcagtctctgcctcctggacttaaatgaccctcccacctcagcctcccaagtagctgggactgcaggtacacaccaccacacctggctaatttttatatgttttttagagatgtggtttcaccatgtttcccaggctagtctcaaactcctgagatcaagcagtccacctgcctcagcctcccaaagtgctgagattacaggcgagagccaccatacctggcctcaatcattaatcattaaatattatatcagctgttggttttttaatagatgttctttatcaggctgaggaaattcttttttattcctagtttgttgaacatttttattatgaaagggtgttagattttgtcaaatgctttttctgtgtctgttgagatgatcgtttggtttttccttattctatgatgttatgtattttatggatttatttttggatattaaatcatccttgcatttc

SEQ ID NO: 77 - DNA, 5427 bp, Homo sapiens
ggggaagtagaagccggagccggcggcgcgcggagggcgccctggtagctccctcccgattgcccggggccggttgcgcctcggctggcggggccgcggtgaggaaggggcggccgctgcacccacctccaccgggtaagtcgccccctgtgcgtcgcagggagctcgggatcggggattgaaacagaggcagaagtcccgaaggtaatttggagatggcgcccagtggagacaggggcttctcctcagacggaactgggacgtgaggggacggtggtgatgagcacgagggcaagtggtgggagtcgcagacaggaggagccggggctgagggcccgcgcagtggactgaggtctctggagaggcgactgaagactggagtttgggaggcgagtgtcgcctgggccgcgcccggcgccggacagttctcgtttgtgtcagtagagatcgccagaggatcagaaatgaacctcggtggggtccttgtctccgaggggcgccccctccgccccaacctcctcccacaacacacacgcacacactaccaggaggccctttggagctcctctggcgccttctcgactttagtggctcttgggggtggaaaggggacgttgcgtctaggggaaggttgtgaacctctggggctcacattggagagagagagacagagccctaggaaccccctctctgtgcccgagggcccaagggtgcattccctgtccttcccggaaccagcccttagctccagctaagagcgtgccttctccgcgccaccgacaactacttttcacatcagcctgcccgacccagctttaagtgctgaatgcaacccgttaggagagccgcttgttttccaaagtcttgtggtaatgattttgtcacgtgttaagaagtaaattcagataagagagtgctttcagcgcgtgtttcctggagaaacccagatctcccgtattgaaatcgccctcatccggggaaggtcgggcttggctgaaagaacgttcctgaaggcaacactgacgatgcgtaatctcattgtaacatatttagtcattagagcagcgcgaacgaataaagccaaggagttcgcccagggggacgtggcgtttggttccccaataaaccggtgataatggattggctgggacaggctcgtttggcccgaggggggcttaaagctaggtttttaaagaaaatattggagagaggccggttccattttgtagcgtgcccggagccacagttcgtgttcaatttaacatccatgaaagttaaacggctttcctcgccttttattttattggatgcatttttaaagatctcattaaagtgcatttatcaaagtcctaacatatgcccgcagggtcttatgcccacacaatgaagctgattaatagaaagacaaatactaatttctattactatttacatccttgggagatatgtgccccttttgtggtgggagggaggcagataattgggaaagtgttgtatattttgccttgaaaaagaatagggagaagggagctcacctagatgccttcctcctgcatccacagttaatcgcagggggactccaggctctaggtcccaggatcagttctctccgtggcatcaatggggttcccgccactctgtaggaacggggtggggattttcccccagacacagaatctgaaagtctctgggcctggagaacttatctacccaactccttcttagttgacttgggaggattgtccatctgggaggcatccactcattcttcccttcctggggcaatttaaagagttaatataatatggaccaaaggaaaaaaaaaaactcaccttaggcttgaacccaaagcaggctgagatttcctttcttttcacactaatgcccactttctcgtccacctgtccaatggctgtgagtctctcctgccagagatctgccgggcacggtctggcctctccaaagttgcagactcacacagctttaggcctccccaacccagagactccactctgccaccccacagacagaagggatttcctatgaccctgtttccttctccgggggcagaaggtgagggcaattggagctgggatggattttcattttctggttagcaaaggtcccagcacggggtagtactcctggggtgcattcccctatttctttcatccaggacgtgagagctgacacctctgcttcctgcagcccctgctcccgcattggaagtcgaagccaaagtggggctgttttggagatgccatccttaaggtgaacgtctttatcgccacactcagggaccagattgggtgacattttccttccccattgatttcaagtgcatgccacgctctgagtctccaacccaagataaaataaaccttccccctccgacaaaacctttgtgtccgcgccgttaatccttgctggagcaggaaggtgcaacgcgctttgtttccggagtgaatgaagacaaacgcttgcaccttggcgctaaccagacaataaactaatccacttgaaggttgttatctgagatgggatgtgcgagggcctgagagctcagccacatactgtaccaggaaaggagtttcttttcaaccctttttcattccaaaaaaaagacgaagaaatgaaatgaagtcaaacaaattagtgtttccaaataaagggaaaagaccttgtgtgtttaatgattggaagcgcttttgtgggtggggagtgtgaggtgtgccgcctagggctgctgaagctttgggctcctcaaggtcgccccctctttagagcaggccccaagaccccacccctacccccgaagactttctctgccctttactccccaggaggacagggggcaggtacctgcactgcaagctttcaccaccggcttgaacggggaaggatgcgagcgccgtctccaaagaggtgcccagaacagggatggggggagggtcggatgccgtccacggagcccacttcttccacaggcacaagaaaggctcccctccgtagggtgtgccgaggcctcgcctgctctcctgtatcttcctttcttgcctggtttgctgttgtttagagcgcacccccacaacagggggcgtaaagctgaggcgtgggagggcagaagccgggaaagcagggtgcctctgggcggcccccgtgccctggagcgcagaaaaggcgctcgtgtttgagctacctgggaaagtaaacaggtaaacactgagccgacttagagggccacttgtcctggagtggggccacttagcctgtgtacattcgcctcccctcctgggcctccggcgattgttcagcctccccgcgcccgctccagccgcctgaacccgaactcaattcgttgcggaacccagagcagcagagagagcgaggctctcctctagcttccaggggcacaggttctcttcctcccctctcctgcctttcccccgggcgtaggactcccaatgcgtccgttctcaacctaggaagaatgaatagagctagagatgtgtacggaatctggagccccaatgctgataataaagatcgagttgaggggtccagctgttcaggttaccccagcaggggcgcgcggtgttcgggacgctaaggagacaccaagcaaatctcctccggcccggggcatgctgggttcagaacttccagcacccagctcaacttcctccccaagcatgcagcagaacgaggcatcttgcagagtgcctacgaggtctccagaccacggcagctgagcccaaagctcaaacccaaacttgacggaacggaggacattgaactcgcttgggtgcaagacggtacctggaaagaatttactaaagaatgccgagtgggggagaccaggagctgaaactggtgcaggcagacgctgacagggtgggagtggtgggcccttactgaagaaccctccggagggggaagggagcggggcagggcctctcagcctgcgggtgtgcgggatcgcagagaaccaaagctcctgggctctagaaggcctagctgtggtactctcgggaggcctcttggggagtcctcaggatgcaatcacctgtttaattgggacagaaaaggtgcgtttggcgcctggcccctaggctctttgggcgcaagccgggcccaagaaattgaggagacactggactgtgctctgggcaccggacttgccctggccgccagctgggcctgcgcaggcctcccggcgtccacaggccgctcctggggacttgcattttatgatcttccactaacaagcccagtttctccccttcaattacggacctcccagcggtctcccagcgcctttcaattgcaaatgttaacgctctggaaatggacgcgggaaccacacggacgagaagtgatggggaaatgagtctcgaggtcccgggagaggctgagtgctgtggacccggaagcaccgatcgcggaggaggcaaggccgaagctctctccaattctctccctccctgcccagctgcccccaggccaggggaaataaaaactggaagactcgctggggtgaaagtgtaggaggggccggagtccaggaggcgtcctgcgagggcaggggaagtgggcgcctcaggtgctccgacaagaggacaccgcaagctgagacccagaaggattcggctggtcattgaggctaaggggcaggcgcaaaggcaaacccgacctttgagaactgggctgagggcctccttctctaggcgcctatggcagcactccctccccgtgattaattccaggagccaggattcccctaggaaagcaatcctctctcaggcgctctgcggaccttgcaggctcccacgggtgaggggaggggacttgatcaatagcagcggtgctgatttagatcctgagaagaaagggtcactatgctggggaagggggagagaagttgggaactacatggaacttcagcgaggtggttcccagctgaagaaatgaacacgctttgggaggcctctgcgggcactcccccacctaagagggctctggggatatgcgagaaacgacacttgctgccaaagacccctttgccacctgacccaagaatttgcctggcccaaccagatcctattctgggtccccaacctagtggctgccctggacccccaagacagcctccacccccttaggactgaggaataagaggaggaacaaaaggagggtctttgctgcaacgcttgggttgaggaactttttttctctccagttatttatttagcagctgagtaacaatagcagtggcaggcccactcccgcccctggatccaaactcgacgcttccccgactcctggagaaccaacttccctcctccgacggggcagagcgacgagctcccacgtgaaagggcggaggatgggggggacgctggagaaagcagagacgaaagcagggcc

SEQ ID NO: 78 - DNA, 3389 bp, Homo sapiens
aggctctgcgctgggcctgcttgagggtggcgggcttgaggcgggcaggctgcttagttgcggcccgaggcgcctaagtggggatgaccaacccgtgggcgttggcgctgacccctaggcgccgctggtggccccgcgcgcggccctccggccagccccgcccctctcggggctcctccttggtccccgcgccatggcgcgtccgcgttgaccgctgtcttccctttcgggctgtgctgatcgcgaacgctgcgcagtccgtggtggcgtcgaggcacctttctcgtgcctttacctgtgttcactcctttgctttaaaaaacagccctagaagtacacatcgttggccccgaaggagccccagcagccatgtcggaccgcgaggtgaccttggagggcgggaggacggacgaggggcctggcggagctagactgagagggcgccgccggcgtcctgaaggccctgctccccgaatgtgtgggagtgtgtctgacggtgcgagggtggctgtggcggggcctgagcagcgtgtccgtgtcccgatgccgcccgcctgttactgagttaggcaggagtgcccgagtctggcgaacttcagcagttctcgttccagagctccacacgaggttggccaaagctttgcgggacttacatacccttcttcctccgcccagtcctgcttccttccccttcctttcacgggtgttgataccatgtcaacatcctcgtaccccaaactcagtcgcagcgtctgcttctggagaaaccattctgcagcattaaagctggtgagaagatgggattcgaggctgcatcactcaccagtggtgaagtaggagggtgaactagtgaaatggaatccacgagtgggtgaagtatcagacatttcatatatggtgaacgtagtagataaaaggaaggaaagggggattggatagctattgcttagtgccaaccgagactcttaagaatagtggtcagctgaaggcaagcaacaaacagttgtaagccagtgaatctgtcccgttacatatagagaagcttcatttactgcagcaggtcaaagacaagaaccaggcccaggaattaacatccctgtttgactgaactccaaaaatagcaaaacacccaaacaaggcaatactcttccactaagtttggatccctgctaagaaaagatgaggctgggcacagtggctcacacctgtaatcccagcactttgggaggccaaggcgggaagattgcttgagttcaggagttcaagaccagcttgggcaacatgacaaaaccccatctctactgaaaacacaaaaaattagccgggcatggtggccacggctgtggtcccagctgcttgggaggctaaggtgggtggatcacctgagccctggaagtcagggctgtagtgcagttgctggatcatggcccactgtagcctcaacttcctgggctcaaacgatcctcccacctgagcctcctaagtaactgggactacaggtatgtgtcaccacacctggatacattttttattacttgtagaggcaaggtcttgctatgttgcccgggcttgtctcaaacttctaggctccagtgagccatcacacctggcctgccttgaacctgaagcctgccggggtggctcacctctcctattaacctgacactactcctcctccctccacttactgctcagtagatgtataattatggttgtttcttttgcattattcagctggaaacaatgagatagaaaagagaatctgtctcatgcctctctcccagcttctggtggtttgctggcagtctttggttccttggcttatagaggcattgtcccagtcctgcctttatattcacatggtgatcttgttgtgtgtgtctctccagacgaaggcataagtaacatcattgacaaaggtcattcgacatgggcctctttttagaaggacaccagtcatactgattagggcccactctaatgagcgcatcttaacttgtctacaaagacccatttccaaataatgtcacattcacattgaccaggggttagggcttcagcatcttttgagagggacacacttcagcccataacaagctgtaccacccagccaacatgtactgacaggagctgggaaagtttggggctggattatgagggtgcttgatgaagggagctggaatgtaaacttgcatagatgtgtttattgaaatacgtgatttaacaccttggcaaagagtggctgcagacttcctgcaaggatggctcctagaatggcggtatagctactgctgcctaacaaattactccacacttcgtggcttaaaacaagaatcatttcttatctctaggttactgtgggtcagacatagtggggatcggtgatctctctaggttactgtgggtcagacatagtggggattggttatctctcttccacagtgtctgaggcctcagctggagcagttcagaggctagaggttggaatgagtgaaggttcatctgctcgaatgtctgacagctgatactggagattggctgcagcccagattggggatgtcagccagcacacccctacacggccggtccctgtggccgaggctttctcacaatatgatggctggattccaagggcaatctaaagacaaaggacaaaagaaagctgtatcctttttgtgaaccagcctcagaagttgcataccatcacttcggctacttcctatttggaagaaatgagtcactaaattacccatattcaaaaggagaggaattaggcttcatcttctaaagggaagaatatcaaaaaatttgccagtatatttttaaaacaccacacttggaaaaagccatgggccatggtaagcaaaattgaaatggcaaaattgctatggcagacagtggtggaagggagtaaaaggttcaggggtgtgggcatgttgaaatttatatactccgtgcatctagaagacatttgagacgatcatattccacatgaaggtgtaaataacacgtcatttataaagatcattagacataggatgatgaaaggggcactgatgtcactaaaatattcagtgatggctcatctctgtaggcaagaatgacaatagaaaggctgttccagaacttggctgggtgatagcactggggatgataggatcctaagacaaaagaggccattctgggacatagtggggaccaaagaaaaaaacccaagaagccaaaggcaacacttagctggcagaagtcagaggattgcaattatagcagccagcagggtctgagtggcagccaaggggacctcacttgtatggttatagaactggtcaataaacatggcatccctggaggcaaaacaggtgggcagctaagaagggtactactcagct

SEQ ID NO: 79 - DNA, 2065 bp, Homo sapiens
tttttttttttttttttttttttgagacagagtttcactcttgtcatccaggcgggagtgcaatcttggctcactgcaacctccgcctcccgggttcaaacaattctcctgcctcagcctcccaagtagctgggattacaggcgctcgccaccatgcctggctaatttttgtatttttagtagagatggagtttcaccatgttggccaggctggtctcgaactcctgacctcaggtgatccgccctcctcagcctcccaaagtgctgggattataggtgtgagccactgcgtccggccaagacctaacttttaatttcattgattttctgtgtcatttttatattctctatttcattaatttccactctaatccttctttgggtttactttgctcttcttttttcaatgtcttaaggtagaaatttaggttattgatttgagatcattcttcttttcctttatttatttatttagagacagggtcttgctctgtcacccaggctggagtgcagtggtgtgattgtagctcactgcagtcttgaactcctgggctctggcaaccctcctgccttggcctcccaagtagctgggactacaggtacacgccactgtgcctggttaattttttaatttttattttgtagtgacgggatctcactatgttccccaagctggtcaggaactcctgggctcaagtgatcctccagccttggcctcccaaagtgctgggattacaggcgtcagccactgtgcctggcctcattcttctttttaaatgtagacatttacaactttaaatttccctctaagcattgttttacttgcataccgtaagttttcatatgttatatcttcattttcgttcatctaaaaatattctgatttcccctctgatttcatctttgacccattggttatttaggagtgtttgtttttcacatatttgtgactttcccagattagttattaacttttactctagtgtgatcagagaacgtactttgtacgatttcaattcttttaaatttatggaagctatttttttttaattgaggcttttttttttaaagatggagtcttgctctgttgctcaggctggagtgcagtggcaccatctcggctcactgcaacctccgccgcccgacttcaagtgattctcctgcctcaacctcctgagtagctgggacctggtaccggtgtgcattaccacatctggctaatttataaattttttggtagagacagggtttcaccatgtttgtgaggctggtcttgaactcctgacctcaagtgatccacctgcctcagcctcccaagtgctaggattataggcatgacccactgtgcccagccctaattgaggcttttttatttttatttatttttaattcatttattattattactttttgagatggagtctcactctgttgccgaggctggagtgcagtggcgtgatctccactcattgcaacttctgcctcccaggttcaagtgattctcctgcctcagcctcccaggtaactgggattacaggtgtgtgccaccatgcctggctaaattttgtatttttggtagagacagggtttctccatgtttgccaggctggtcttgaactcctgacctcaggtgatccacctgcctcagcctcccaaagtgctgggattacaggtgtgaatatatatatgtatatatgatggtatactactcaaccataaaaaggaatgtattaacagcatttgcagtgacctggatgaaactggagactattattctaagggaagtaactcaggaatggaaaactaaacattgtatgttctcactgatatgtgggagctaagctatgaggacgcaaaggcgtaagaatgatacaatggactttggggacttggaaggaagagtgggaggggggtgagggataaaagactccaaatatggtgcaatgtacactgcttgggtgatgggtgcaccaaagtctcccaaatcaccactaaaaaatgtactcatgtaaccaaacaccacctgttccccaataacttatggaaaaataaagtaataaaaatt

SEQ ID NO: 80 - DNA, 2063 bp, Homo sapiens
ttttttttttttttttttttttttatttttattactttatttttccataagttattggggaacaggtggtgtttggttacatgagtacattttttagtggtgatttgggagactttggtgcacccatcacccaagcagtgtacattgcaccatatttggagtcttttatccctcacccccctcccactcttccttccaagtccccaaagtccattgtatcattcttacgcctttgcgtcctcatagcttagctcccacatatcagtgagaacatacaatgtttagttttccattcctgagttacttcccttagaataatagtctccagtttcatccaggtcactgcaaatgctgttaatacattcctttttatggttgagtagtataccatcatatatacatatatatattcacacctgtaatcccagcactttgggaggctgaggcaggtggatcacctgaggtcaggagttcaagaccagcctggcaaacatggagaaaccctgtctctaccaaaaatacaaaatttagccaggcatggtggcacacacctgtaatcccagttacctgggaggctgaggcaggagaatcacttgaacctgggaggcagaagttgcaatgagtggagatcacgccactgcactccagcctcggcaacagagtgagactccatctcaaaaagtaataataataaatgaattaaaaataaataaaaataaaaaagcctcaattagggctgggcacagtgggtcatgcctataatcctagcacttgggaggctgaggcaggtggatcacttgaggtcaggagttcaagaccagcctcacaaacatggtgaaaccctgtctctaccaaaaaatttataaattagccagatgtggtaatgcacaccggtaccaggtcccagctactcaggaggttgaggcaggagaatcacttgaagtcgggcggcggaggttgcagtgagccgagatggtgccactgcactccagcctgagcaacagagcaagactccatctttaaaaaaaaaagcctcaattaaaaaaaaatagcttccataaatttaaaagaattgaaatcgtacaaagtacgttctctgatcacactagagtaaaagttaataactaatctgggaaagtcacaaatatgtgaaaaacaaacactcctaaataaccaatgggtcaaagatgaaatcagaggggaaatcagaatatttttagatgaacgaaaatgaagatataacatatgaaaacttacggtatgcaagtaaaacaatgcttagagggaaatttaaagttgtaaatgtctacatttaaaaagaagaatgaggccaggcacagtggctgacgcctgtaatcccagcactttgggaggccaaggctggaggatcacttgagcccaggagttcctgaccagcttggggaacatagtgagatcccgtcactacaaaataaaaattaaaaaattaaccaggcacagtggcgtgtacctgtagtcccagctactcgggaggccaaggcaggagggttgccagagcccaggagttcaagactgcagtgagctacaatcacaccactgcactccagcctgggtgacagagcaagaccctgtctctaaataaataaataaaggaaaagaagaatgatctcaaatcaataacctaaatttctaccttaagacattgaaaaaagaagagcaaagtaaacccaaagaaggattagagtggaaattaatgaaatagagaatataaaaatgacacagaaaatcaatgaaattaaaagttaggtcttggccggacgcagtggctcacacctataatcccagcactttgggaggctgaggagggcggatcacctgaggtcaggagttcgagaccagcctggccaacatggtgaaactccatctctactaaaaatacaaaaattagccaggcatggtggcgagcgcctgtaatcccagctacttgggaggctgaggcaggagaattgtttgaacccgggaggcggaggttgcagtgagccaagattgcactccagcctggatgacaagagtgaaactctgtc

SEQ ID NO: 81 - DNA, 6492 bp, Homo sapiens
ttttttttttttttttttttttttttaggaaggaagttttcagactcagattatagcattagggaagctattattccttctagattttgtcattagatttgaagaaagtgtagttattccaattgtgttttcttatctactgttttcacaatgcatgtgcacagttcaatcggttttcatttcagtccattattgagtggatattgcaacaatttaaatgtaaaactcttcagctacaatgcaacaaaaggtaatcacagcaatcaaggaaaaattattgctatatacaataacttggatggatctcaagggtattatgttaagtaatataaaaaaacctcaaaatttcacatactatattattcgattcatgtagcttcacaaaatgacaaaattatagagatggaaaacagagtggtgattatgagcagaaaagaaagaattatggagagaggttgaagatagatggcagcaggggatagttggtagattagggtccctggagtagctggcaagggtggaatacaggacaacaagaaaatgtttattctgacactggtagggtccctctaccattgacaggagatagaacattgtaggagtggtattttgactaccagccacttcctgcatcaattcctccagataatcagcccttaactaaatctttcttccctaatggtcaatttctattagcaattattatatcattaagattctttttctttattatttaatgagtgtagctttattgaaattcgactctggtttctctcaagagaacttaaagtaaataagcattttatgttctgaaagaaattgttccataatctcagttattatttccatatagtatccacgtggacaaaataaattctgaaaacatttgagtaagaaataagaaattctaaaaatataagaaaatagaaatgaaacacattgattatggataagagataaaatatttttcaataataattatactgtaacaataatattttattgtctaaagtcaaggaggagctgtaatacattcaatgccacttaatgccagaaaatgggctaagtacctttcacttaaaatatatgtgatatttcctatagaaaatatgaggtgaaaaattagaaaattgtcacacattatataatatatgtttaataataataaattatccaatgtatttagaattctgtatattcatctatttctactgttaaactgtggaggacattttttgttttcctttgtggagaatccagtttcctctctctgagtaatggtgccctgattttcctgagggaaatatcctttctatttttttcccttgtgatttgtgtgaagttggacacatattcagcttccggattgtgaacttgcctcaggttggtttttcaaataattacaatgatgctcaatttcagatttttgctggaactgtaagaaaagaggttctctgtcctgttggcactgttaaactagtaagatataatcctggagttgttgacgactgccttatttctataaaaataattcataataaagtgaacacagagaaaagcagaactgagaatatggagaaagaattatgacactgtgagattctgattccttggcttgttcagttatgtaagctaaattccttttcttctttattaactgaagattgtttaattggtttgataataattgcaactaaaaaaaagcctatttaatagtactgaaaatgaatatccatgaaatttaggaaattaatattgactagcaaacaatgttaaggaaaaaagtccttctgaattctttgcaaacataataagtctgtgaaaaaatttcatgtttcttatcacaaaaaactaacaatatatcactgatatgaaatgttcttcccataatctacaaagtattattttattttaatgatactatattaataacttaaagataaaagttatcataattaatttataattgtggaactaaggataggaataagtaaatactgaagtacaaaaagaaaaaatgggctccaagattttatcttgttttttgtttttctctaatgtttcacccaaactctctgacccttagtttcagaagatgtaggagagggttgatacacatattttaaaactttttcctcagggaggtatctggaagatcattgaattgcttctcttcagtgctgtgagcttttctgagattgggacattctgaatataatataatctgatgggagatgtcaacattctaagaaatactagtctttaataaattgcaaactaatgaaatttaaaacattaagaaattctgtagcttcacctttattcaacacttactggatgactctattattcataacaaattgaaaaaccacttatggatattaaaattattttccaaacaaaaattgagtgtgactcaacgtgaaacaaaaaatcttctgagatattattgtttactaggacacattattatatgactcttagcacaaaaaacaaaagctaaaagaaaaaatatcctttttcatatcaaaaaaacccaacatctcaatgaatgagactattctctcgctaatggtaattttatgactacattaactttactgacaacctcagatctctaaagtaacagaatagaagtattgtctttcctaaatcagtgaattggttgactagaatcacaaatattccctgaaggaagctgaacactagcatggaatccatctggccaagtgggtacatgttcaccactttgcagctaataaaataaatggatgatatctccttttctgctgggtagaatcctggagaataatatctagaattattataggtttagtgtagttttagtgttggtttggtgtaggcttagttcttgtgaccataaaattatcaagttagggtcctttgcactggcacactacagctaatgcaagggtctgaaaatgccccaacaaaagttcctcatttgcttcataatgtgcagacccagagggtacagacagctgataagtgcccagggaaagccttattcacaaagaacaaaaatggctctaaataatggctcaagttatctgtaatttggacatctctttaggataatgtatgatccaaccattgatgaagttcatgctaaaaaggaatttggtctcaaaaatacggaaatgacatttagtcttttacgataggaatgctacttcttgatttaataccagaaggaagtacaggaaattgaaaaataatcagccaagaacattgctaactgctttatatgcatggtctattgtgacttctaaagtttttgagacagatatcatcaactacatggcatcactatgaaaataggggttcagatagattctttaacttgtgacggcatcatatttcattatgttgtaatctggcttcatcgaagtataaccattttgaccaggctcagaaaagtcccccgattggggtttaatgctctgtggttgctgtcttgagattcttagtcattttagttttgtatttatatgccatctccatatttagatcctgtctgccctggggtggggttgggtttgcgggggggtcttgggggtaagggtcctttgccattgccaggcattttccttttgccttgagccccacaagttatgtagccagccctgagcagagttacgattcaaatccagttctgcctaacaccaagaacctctggagcaggaatcaagatgtttggtccagaacgaaaatcaattttctaggcttagagaagtacggagaaaatggcattgaatttggagttcaaacacctatcgataattccagatacataatttacattttgtagctctctgggcaagacacttaatctttctaaactgaggcatccatagactttctgtaaagggtcagatattaatattttcaactttgcaggccatatggtctctgttgcaactacttaactctaccattgcagcataaagccaccacacaaaatacctaaacaaatgagcatggctgttttctagtaaaaccttattcatggacactgaaatttgaatttcctataatttttatgtgtcataaaatattaccaaccttttgatttttaaaacaattttgaaatgtaaaaacccttcttagcaccagggatatagaaaaataggcagcaggatggatttggtcctgcaggttatactttgcagacttctggtctaagctattgtttttcattcattcatatatccattcatcactgttcaaagtgtgtttataactggactaggcattagggatcaaaagacatggatttgtatgatctagaccttgaagttcttaagcgccacctcacgttgactttcccaggcctaaacaaacaagtgaaaacagactaatgggaaatagcttgggaaaaaaaaaagaactaagtctttcctaaaataacatctgctttttaagtcccaaattgttttcatttttaatatatgtatatattcacatttatatgagtatttatatgagtatttgtgcgcatatatacacatatacacacatacataaacatacacatatacatgtattatgcataccttatgtgtatatatacatatatgaatacacacacagtatcttacaattctgaattagagatccaatcacattgcatgtatagtatagtgattagaggaatccaacttgggttttatatccaaatatatcatccctgtcctagaaatacaaccactgaaataaattacaaacagtactatcagatagtttgcaacagttaggaatactcaccctattaagtagtttcttgccatgtataacacaaatgtgcacctgagttgagcagccaatctatatattttgaagatacaacaagataatttttctttaaagacaatcagaagtgaacttgtaagctctgattacaaagttattaaaatggaagtcaatactttttcagagtaaaaagctaagaatcttcgtgcaagtctcaattacgtaaaaatataagaaggacttaaaaaaaaagggctttataggccgggcacgtggtggcttatgcctgtaaacccagcagtttgggaggccaagctaggaggattgcttgagggtgggaggactgcttgaggccaggagtttgagaccagcctaggcaatatagtgaaaccctagctctacataaaattttaaaaaaattagccaggtgtggtagctacttgggaggctgagtcagcaggatcccttgagcccaggaatttgaggctgcagctagctacaatcatgccactacactccagctgggcaatacagcaagaccctgtccctatttttttaagtgctttataaatacggtatggggtcaactgagttccttgttgaaacagtatactgtttccctggttccagctcacaggttctgacccaaaaggtcaggaatgaggccaagaaatctgcatttttttaaacaagtagattaagttattttgatatagcaagctcaaggacaacacttgggaaatggctttaaaagaaaaatagttaaggtttttaatttttatatttccctagttccagtttggagacattctggatacttaagggaagcagaagtctcttcaccctatatgcctttatctagaaacacctcccaaaggaagcagagtagccagtggaaacaatgacaatattgcaagcagatttggggccagaagaaaacactgctgagaaaaacagagtgttatcctttgcagcttaaaaattctaaacaagaggcaaaaatctctcatatgtagcttttccttgacagctggagaaaggtgttgttaagaccctcagaccttaaagaacctttgagtaaggaaaaggtgatttccagacacgtaagtcctgttacaccagtctgaatacaaaagcaaacaaaacaacagacggaacaaaacttggcaaatattttctctatctatctacttactatccagaggcttttcattcctggaactcttgataaaagtttcaaataactcaaatataactttcaaacattattttgttagtaatatgtaatcttgataatgtgaaatgtgaaagaaactctgtggctgtctgacaatgacacagcttgattctctccaagaggccaaagttttggtctgtattcacgaattcatttgtgaactagttactctgatgaacaattcttacaagaaggggtattctggctgggcgcggtggctcacgcctgtaatccctgcactttgggaggctgaggtgggcggactgcctgagttcaggagtttgcgaccagcctgggcaacagggtgaaaccccgtctctactaaaatacaaaaaattagccgggtgtggcggcgtgcgcctgtagtcccagctactcgggaggctgaggcaagagaattgcttcaacccgggaggaagaggttgcagtgagccgagatcgcgccactgcactccagcctgggcgacagacgagactccatc

SEQ ID NO: 82 - DNA, 1415 bp, Homo sapiens
cacttatacagggatggtggtattgtaattagcacagccattctggaaaacagtacaaagcttcccacaataataataataatattaacatatgatccagcaatcccactactggagtatacccaaagtacttgaaattaatatgctgaaaagatatccacacccccatatttactgcagcattattctcaatagctcaatattgttcatcattggatgaatatttttaaaatgtgatgtatatatgcaataaaatattattcagctttaaaaacacaggaaattctgccatttgcaacaacatggctgaacctagaggatattatgttaagttaaattcaccaggcacagagagacaaatactgtatcatctcacttgtatgtggaatataaaaacattgaactcatagaagtagaaaatagaaagacagttaccagtggctctgaagagagtgtggacgggaaaaggggagatgttggtcagtgggtacaaagctactgttagataagagacacagttctgacgtttcattgcacagcaaagaaaatataattaataattttgtattgtttattttaaagaaaggattttaaatattcttggcacagagaaatgataaatatttgagatcatacatatgcttattagccggattaatcattctacatcatacactcatagcaaaacattacactgtaccccataaatatataattatttatcaattgttatttgtcaagtattaacaaaattattatatgacaaaattatttgtcaattaaaaataaaactcttaaaaatttaataaataaaaaatagagtctcttgtaaacattaaagcaaaacttctctaggattttcttagtccctgaaattcccattattaatcaatccttttaatcaaatctggcagcgaatattcttttttacttacgattgcattatatgtttaacaggaactaaatattaatccattctcccactaattgtattaacaaatatatgaaagtgcaagggggttgggaactctagtcagtggagcaactagtttaaagaaaatgcatcgtctatatgttatttgaaattctagatttctgtgaagctcaatgaccttaaaaactaaactaacatagggctgggtgcggtggctcacgtctgtggtcccagcactttgggaggctgaggcaggcagatcacctggggtcaagagttcgagaccagcctggtcgacatggtgggaccccatctctactaaaaatgcaaaaattagccggacgtggtggcgcgctcctgtggtcccggctgctcaggaggctgaggcagaagaatcgcttgaaccctggaggcggagattgcagtgagctgagatcatgccactccactcctgcctgggcaacaagagtgagattctgtc

SEQ ID NO: 83 - DNA, 6079 bp, Homo sapiens
gtgttttcactcacaaatttgtccattggattgtaaatccttaggagcatggattttagtcatcatcaatcctagtacttagcacacaacagacaggcaattctttagaaattttttgatggcacactcactatgtgctagccatcttctagggctagggataagcagtaaccaaatttcctactcaggtggatctgagattcttgtagggaagagagtaaacagataattaaaaaaacacatagttatataaaactataaaagtagtatgggccgggtgcggtggctcgcgcctgtaatcccagcactttgggaggctgagacaggtggatcacctgaggccagcagttcaagaccagcctggccaacatggcaaaaccctgtctctactaaaaatacaaaaaattagccaggtgtgatggcaagcgcctgtaatcccagctacttcggaggctgaggcagcagaatcgtttgaacctgggaggcagaggttgttgcagtgagccaagattgtgccactgcactccaccctgggtgacagagcaagactccatctcaaaaaaaaaatatattatgaacacaaagcggataactgaaatagaataccaactttatacaactttatcatttaataaatgagaaaataaggctcataaaaagacaaaagacttttccaaatcacccagctagatagcaacatagtcagcatttcaatttttttgtttgtttgtttgttgttttgagctacaaattcagtgttatttccacaattgagtaatggcttgcagtgctggaactgggaagaggacactattcggtaatataataagttgcttctgtgagaataaagtttgaattaacaacttcttgtttaagtacaaattctttaaagatagtcattgtattttagttacataagatttatagcttttgaaagaaaatttcaagttttcctgctggagttgaattttatagttttatagaaattttctagcagacagtgaaatgttgctttatggtcaattacccttaattagctttaattaaaattaaaataattttatggcaagtatattcagaagtatccatttttgtagataaatatattattgctatttttaagatatattggggaaaaataaaaacaaaaatagcccaaacatttaaatacaaaatggggaaaaataaaaaattcataaaataaaatatacataaatgatcattcaacatataaaaatgtacagtttcactaaaaatcaaagaaatgcaaattaaaagattgatgaactatttttttaaatttagccttccaaattagcaaagatttgtgaataataatggtgatgctttgagagaggcactttaatcttatatttttgcagatgggttaattgtcacaaatttactagggttctatttggacaatatatatcattacatttaaaaattctacagcttgaactgaagacttacacctccaggaattatttttgaaaattttatatatctatattttctattgtattgatagacaatattttacatatttatgggagtacatgtgagtgtttgttacatgcatagaatatgtaatgaccaaatcaaggtattggggtatccattaacttgggtgtttattatttttttacacgatatcattgcaagttcctctcttctagttactttgaaatatacataatattattgctaagtatagtcattctagtctgctatcaaaacactagaacttatttcttctatctaatgatatctttatgcctgtaaccaacctctctttattctcctcttgccctcgccccacccttccaagtctctggtacccatcattctattctctgtatccataagatcaagatttttagtccccacatgtgagggaaggcaggcagtatttgtctttccgtgcttaggttattccacttacacataatgaccttcagttctattcatattgctgcacatgacatgactgcgctctttatggctgaatatttcattgtgcatatataccacattttaaatgcgtttgttcactgatgacacgttgattccatatctttgcaataagcatgtgagtacagacatctctttgatatgctgatttattttcctttggataatcaatacctagcagtgagattactggactgtatagtaggcctctttttagttttttgagaaatccttaatactgttttccacagtggctgtactagtttacattctcactaacagtgtagagttccttttcagcacatccttgccatcatctgttcaattttgtcttttgataatagccattcgaactggggtgagatgatagctcattgcggtttttgatttgcatttccctggagattactgatgctgagcatttttttcatatacctgctggctgtttgtatgtcttctttgagaaatgtctattcatgtcttttgcccttttgcccattttttagtgggattttttttctgttgagttgttgggaattccttgtacattttggatattccatgcggaacaagtaatttgcaaattttttccccttcaagaggttgtctcttcactctattgtttcatttgctgtgcagacagctttttaggttattgagctttatatgtctagcatttgaaataatatatataggatgcattttctttatataatgttaggtacaagatgtttagaattacaaaaacaattaaaataatctaaatgtttaaaaatgagtggcattcaattaggaaaagaggaagtcaaattgtccctgtttgcagatgacatgattgtgtatctagaaaaccccatcatctcagcccaaaatctccttaagctgataagcaacttcagcaaagtctcaggatacaaaaccaatgtgcaaaaatcacaagcattcttatacaccaataacagacaaacggagagccaaatcatgagtgaactcccattcacaattgcttcaaagagaataaaatacctaggaatccaacttacaagggatgtgaaggacctcttcaaggagaactacaaaccactgctcaatgaaataaaagaggatacaaacaaatggaagaacattgcatgctcatgggtaggaagaatcaataccgtgaaaatggccatactgcccaaggtaatttacagattcactgccatccccatcaagctaccaatgactttcttcacagaattggaaaaaactactttaaagttcatatggaaccaaaaaagagcccgcattgccaagtcaatccaaagccaaaagaacaaagctggaggcatcacactacctgacttcaaactatactacaaggctacggtaaccaaaacagcatggtactggtaccaaaacagagatatagttcaatgcaacagaacagagccctcagaaataatgccgcatatctacaactatctgatctttgacaaacctgagaaaaacaagcaatggggaaaggattccctatttaataaatggtgctgggaaaactggctagccatatgtagaaagctgaaactggatccctttcttacaccttctacaaaaattaattcaagatggattaaagacttacatgttagacctaaaaccataaaaaccctataagaaaatctaggcaataccattcaggacataggcatgggcaaggacttcatgtataaaacaccaaaagcaatggcaacaaaagacaaaattgacaaatgggatctaattaaactgaagagcttctgcacagcaaaagaaaccaccatcagagtgaacaggcaacctacagaatgggagaaaatttttgcaatctactcatctgacaaagggctaatatccagaatctacaatgaactcaaacaaatttacaagaaaaaacaaacaaccccatcaaaaagtgggcgaaagatatgaacagacgcttctcaaaagaggacatttatgcagccaaaagacagatgaaaaaatgctcatcatcactggccatcagagaaatgcaaatcaaaaccacaatgagataccatctcacaccagttagaatgatgatcattaaaaagttaggaaacaacaggtgctggagaggatgtggagaaataagaacacttttacactgttggtgggactgtaaactagttcaaccattgtggaagtcagtgtggtgattcctcagggatctaaaactagaaataccgtttgacccagccatcccattactgggtatatacccaaaggattataaatcatgctgctataaagacacatgcacacgtaagtttattgaggcactattcacaatagcaaagacgtggaaccagcccagatgtccaacaatgatagactggactaagaaaatgtggcacatatacaccatggaatactatgcagccataaaaaatgatgagttcatgtcctttgtagggacatggatgaagccggaaaccatcattctcagcaaactatcacaaggacaaaaaaccaaacactgcatgttctcactcataggtcggaattgaacaatgagaacacatgaacacaggaagggtaacatcacacaccggggcctgttgtggggtggggggagtggagagggataacattaggagatatacctaatgtaaatgacgagttaatgggtgcagcacaccaacatagcacatgtatacatatgtaacaaacctgcacgttgtgcacatgtaccctaaaacataagtataataaaaaaagtgagaaagttatttagcaaattaaaaattatgatatattcaaaaattaagtatgtcaatagaaatattttcaaaaattaatatagaaaaatttatattttattaagcacaaatcataaagaaaaacatatgaactctgatcatgaaaatggcatatataaagtttgtatgcagatttaattgtatttaggaacaacaacaaaaaaaaaaacctagggaaagtttaccaaaactaatgctagcaacaggtattgctctcttctggaattaggtgatttttgttttcttcatcacagttttttatttacctaaattttctatagttgtctatactataatatataagtactgtctttctaaaaattgttattatttggttgttttataataagagtaacaagacagtatgtttaaatgcagagttaaccattgctacctgccatcccaccacctatatctgtttttgtcccactgaagtaaaaatgttaacaagcctgggtgcatctttccacatttttcttctgggtgctacaaaactatacatatttaaacattagtttctagcttcttttaccaaaattttattatgctctttattttgcaattctcttttttcacttaacagtttatcatgatcacctaagaagcagatagatctgattctgtataactattcaaattgtttatgtatatattatttacacagactttgcttccattttactgaaatggaagcaagtcatgtgtatttttttaactactatttttttaaactttcattcaatctgataaccatttagccattttattttcactcccagatggtaatctataaaaatttgcttatataatttcttacatatataggggctttattagctttttgaaaatatatttatatgcatctgtttgcatcttacttttattgcttaatgctatttcatgggacttttcaggccaactatgctaactcaatctttttaatgacagtctaatattccatgctgttgatatgccataataaatccaactattcctctatgacattctttttacaatgaggcagttaacatccctgaacatctatcctaatgaattgatgcttttaattgctatggtataggtttacaggattagcattaccaggcctaaccatatgtattttttgaaataaagtagtgctaagtttttcttcctgtcaaaaaacctataagaatgtacatttcttatatatgatgttacattagtattagaagtaaaagtattctcagagcaaacaggaaatgggttaaatgaaaataacagtttaatgttattgctatttgaaaaataaataaacatccaag

SEQ ID NO: 84 - DNA, 2677 bp, Homo sapiens
ttttttttttttttttttttttttctgaactagatattggagttttaatacagaaggtgtaggcaactataaataaaatatcaataaattataaaaaagtagaaatatttttgccagaataaagtgccagaaaaaaaaacaaatgggaggcataaaatatatattcaagaattaaaaaaattaaatgtacaattcaataactgataattagcagcaaaattgacaaaccaaaagagaattagtgatctataaaatatgctattaaaaattcaaattgaagcatatattagttcattttcatgctcctaataaaagcatacctgagaatgggcaatttacaaaagaaagaggtttaatggacttactattccacatggctggggagggctcataatcatggcagaaaacaaggaggagcaagtcacagctgtagatggtggcaggcaaagagagagcttgtgcagggaaattcccccttataaaaccatcaggtctcatgaggcttattcactgtcatgagaacagcaagggaaagacctgctctcatgattcaattacctctctcagggtccctcccacaacatgggggaattcaagatgagatttaggcggggacacagccaaaccatatcaaagcacaaagaaaactaggcaggaacaatacagaataaagcatgagagacatttatgccctatggagtgttcaaatatacatactttcagagtctcagaatgagaggagagtaaaaatattcagtgaaaatgttacaataaatattggaagaggttttttcatacatgctgaaagccattacattcatggagtttaatgaaacaacagtaacaaaaaaaattaaacaaaggatgaaaacattgttagaaaaaaaataaaggtgaagtgatagcaaagtgtgtgtttgttttgaacagaaagaactgtttcattgactcactgtggtagtgatgatatgtgttaaaatccatagtattatacaccaaagaagggtaagtaaaatataaatcaggtgaagaattgtgacagattgccttctatgtaacaaaaagactgaaaacaaaacaagattttccatagaaatggtggatcctagtataaaaggaaatgaaattttaataaatattaactcacaattcttaaatattttattttgcctttttttgataattttttaaaatatttttctttctgtatttccagtttaggaaaattctgttgacctataatgaagtttacagatttttcctcatatctgtccagtctacggattagatcttcaaaggtattctttatgtttattacagtatatttttatttctagcatttctatgtgtataattgcattgtccttctgttcttacatgtggtttattattttcatcatggtctttaatatattaaatatattaagttttattaatattatttttaatagacaaatcataattttatacatttatggtgttcaatgtgaagttatgatatatgtatactatgggaaattattatatcaggttaattaacatagccatcatctcacctatcacttttatggtgaaagatttgaaattactcagttattttgaaatatgcaatacattgttttttactgtagtcactctgctgtgaaatatatctcaaagcctgtttgtcatgtcccctttgatcaagaacttcccattgccttcctcctcactcctacagcctctgttaaacatcactgtgctctctactttttagatttcatatataagtgagattatacagcatttatttttctgtgccagtcttatttcacttggcataatgtcctacagactcatccatgttgtcacaaatgaaaggattttcttcttttttaaggctgagtagcatttcacagtgtgtctgtgtgtatgtttttgtgtgtgtgtgtgagagagagagagagaaagagagtgagagaaagagacagcttatcctttcatccattgatagacatttaagttaattccatatcttgactattgtaaataatactgcaatgaacaagagagtgcagatatcccttcaacatattaatttcaattcctttggatatatacccagaaatgggatggctggatcatgtattagttctatttttagtttttttcaggaatctccataccatttttcataatggctgtgctaatttatattctcaccaacaatatgcaagaattcccttctctgcatcattgccaacactcatctttcatcttttcgataaaatccattctaatgggtgggaagtgatatttcattttggttttaatttgcatttccctaataagtagtgatggtaagcattttttcctgtacatattggccgtctgtatgtctgtatgtcttcttttaagaaatgtctgagccgggcatggtggctcacacctttaatcccagcatgttgagaggccaaggtaggcagatcatgaggtcaggagtttgagatcagcctgaccaacatggtgaaaccctgtctctactgaaagtacaaaaattagctgggcatggtggcgggcgcctgtaatcccagctactcaggaggctgaggcagaagaatcccttgatccccggaggggatgtgcagtgagccgagatcacaccatgcactccagcctgagcagagcgagacccgtc

SEQ ID NO: 85 - DNA, 1995 bp, Homo sapiens
ccaccatgattgtgaggcctccccagccatgcggaactgtgagtcaattaaacctcttttttttttaaataaattatacaatcttgggtatgtctttatcagcagcatgaaaacgggctactacaaacaggctttaatgacttaagtgtgttgtgtgtgtgtgtgtgttttggaacatctcctatggtacactattcctagatagcatttgttaatagcctgacattccaggaaagtgcagatatgtgcaattccaaacaccacgcataaccagcaccaagtatcagagaacttactatagtcataaatgcttcttaattaatgtttaattcctgctggtgaggtaaggttagtgacattaaatatatatcacatcctgaaaagagcctgatgagagatctttgcaaaatagaaaactctctctttacgaacactatgcaattaggatgttggcagctaaatttatctggacatcagctctcagtcaatacaatgtattttcattttatatcacagttcaaagtggctagttgaggattataactttggcaatagcctatgttaatttttatttgccaacttaagaaacattatcattgcattcttgtttcagcaacctgtaaacaagtggtctgtaccttcatccaaattactacctactgctccattattcatcaaacattcattaaatatgtatgagagttttctttctgtgcaagaattgggagtggtgctatgggactctaaggtgaataagacacagtcactgagctcaaattactctgggtgtgtgggagagagacaagtactctaagaatcacatgaaacatgacccaacccagccactgattttatgagcttgaacttttttgtgatattgaccatcttcaataattaaatcttccataaatagtaaacatatatatacatttattcaaaaaatgtttttaatgatgtgttttatatcaagtattatgctaagtactggagatacaggcaaaattaaatatagactggaccttaatgagctaacagttggacagcaaaggcaatcactaataatgtgccataaagtatgtatattgtaccacagactagatttaatgccccaaaagaaccccaaatacgttttgaacaatagtagtattattaaaatagttgtaaacttctaaggggattattttgaatggataaaaatgaatctgcatttatttggatgcattgtctctggtctggtctttaaatgtacccacacatgcacagtatagcatggtacaaaagacattgtacttggaattttgagatctggcttctagttctatactttctacgttgatcttgggtactctcttacttgctctgctccttaattttatgtactgtaaaattaacattgacaagttagtctgtaacacctggggcaatccaatattgtacaactgtacggaaattgcagacttgacttcttcaattgcaaggtcaatggtgaaaaaaactgactctgctggtttgaaatgacaggaccaactgtattaataccttcatgaaatgaaatagaaatggaacttagaaaccacagggacttcccagtgagttggtgaaaatcccttcttctccaaagtctagttactagcttccatttcaggtataaaagttttcatgaaaacaaacctgcttaaaatgaagctatttgtgactgcaaatactttctttaaggtccaggacacattaataccttggcctgaagttgtacttaatacagaggattagggtatttgatgtgagaggtgagacatcctgaggttagagtctgaagatgatgatatcactcgcttggctccttacttatgagacgtcaagcaagttctatgccaatgcaaggggaaatttctccttaatttgtttgtcacaagtcctgaacaaataaccatttgtttacctaatatgtcccttgaacacactgggctattgccaaagaaggaatagtgaaagtac

SEQ ID NO: 86 - DNA, 3078 bp, Homo sapiens
attcacagacagatgaacaacattgaagaaagttctgctggattggtctcaatgacattcatgattgtgaggaatggattccaacattaatggaaggtctacattagcggatggagggagaagggtatttggaaagccagaattggaaaaaactttaaatttcatatggaatcaaaaaagagcccgtacagccaagataatcctaagcaaaaagaataaagctggaggcatcatgctacctgacttcaaattatactataagcctacagtaacaaaaacagcatggtactgctaccaaactgatatatagaccagtggaacagaacagaggctttagaaataacaccacacatctaaaaccatctgatctttgacaaacctgacaaaaacaagaaatgggaaaaggatcccctatttaataaatgatgttgggaatactggctagctgtaggcagaaagctgaaactggaccccttccttacaccttatacaaaaattaactcaatatggattaaagacttaaacatagacctaaaaccataaaaaccctagaagaaaacctaggcaataccattcaggtcataggcatgggcaaagacttcatgactaaaacaccaaaagcaatggcaacaaaagcgagaattgacaagtgggatctgattaaactaaagggcttctgcacagcaaaagaaactatcatcagagtgaacagacaacctacagaatgggagaaaatttttgcaatctatccatctgacaaagggctaatatccacaacctacaaagaacttaaacagttttaaaagaaaaaaaaaccccttcaaaaagtgggtgaaggatatgaaaagacacttctcaaaagaagacatttatgctgccaacaaacatacgaaaaaaagctcatcatcactggtcattagagaaatgcaaatcaaagccacaatgagataccatctcacaccagttagaatggcgatcattaaaaagtctggaaacaacagatgctggagaggatgtagagaaatacaaatgctttcacgctgttggtgggagtgtaaattagtttaaccattgtggaacacagtgtttcgattcctcaaggatctaaaactagaaataccatttgacccagcaataccattactgggtatatacccaaagggttataaatcattctactataaagacacatgcacatgtatgtttattgcagcactgttcacaatagtaacgacttggaaccatcccaaatgttgatcaatgatagactggataaagaaaatgtggcacatatacaccatggaatactttgcagccatcaaaagggatgagttcatgtcctttgcaggggcatggatgaagctggaaaccatcattctcagcaaactaacacaagaacagaaaaccaaactctgcatgttctcactcataagtgggagttgaacaatgagaacacatggacacagggaggggaacatgacacaccacggcctatcagggggtggggagctaggggagggatagcattaggagaaatacttaatgtagatgatgggttgatgggtgcagcatcctccatgacgtgtatacctatgtaacaaaactgcacgttctgcacatttaccccagaacttaaagtactataaaaaaaaaaaaggtcatcttagaattaagaatcatgttttaaatgaaatagaggatctatattgtgacttgttatatctatatctgttctctagattaaatacaagtctgctgcagtttgctggaggtccgctcagtgtctgccctggtggtacaggcatacgagggaatctcctggtctgcggattgcaaaaaccgtgggagaagcgtagtatctgggtcagatagcacagcccctcaaggcttcccttggctaggggagggaggtccccggccccttgcacttcccaggtgtggcgacgccccaccctgcttctgctcgccctccatgggctgcaatcactacctaaccagtcccaatgaaatgagcagggtacctcagttggaaatgcagaaatcacccttcttctgccttggtctcactgggagctgcagacgggaactgttcctattcagccatcttgcctctatctgtaagagatttttattgttctacaacaaattaccagaaacttagtggctttgaaatgacatttaacatctcacagttgctttggatctttggatcaggagtttagccaaggcttagctgggttggttctgtacttcaggatctctcacaagctcaagtaaaagtattggctaggcagtagtcatctcaaggctcaactagggaaagagtttcttctaagctcattcacctggtggaggctaagattcagtacctcttgaagtggtagactgagggcgtcagttgtttgctgactgttggagaaaggctgcacttagttccttgctacttgggtcgctccacagagtagctcaaaatatgagagcttgctttataagagcaagaatgtagaaatgtgagcaagagagaaaatgagaaagagagcaaataggttagaaatgtgagcaagagagagaatgagagaaagagagagctagagagaaagaacaaaacgaaagtcgctgtctttcatcatttaattttaacattgatatcccatctcttttgccacattctattcattaaaagaaagccaaggagagggtattacacaggagcataagtaacaggagtcagagagcattgggaaccatttcagaagctgcctaatgtcatctcctagaatttattaaagactagggaataatatatgtataaattcattttatgcttataaattcattttatacaagtaaacaagttttttacaaaaatagtcatcattgtgaagaaatgtcttaaaaagttttccttaaataaatattttgctctaacaatatcatttaaaaacaattttatttgtatattgtctcatagatgccatacttggtaatacgcatttaggcccagtttaaatctagccatcagtcaatcaacctactatttcttgttgaagtgagttgtacgtgtataaaatatacagt

SEQ ID NO: 87 - DNA, 2568 bp, Homo sapiens
tcttttgcctgctatcatgcatgtaagatttgactttctctccttgctttcgccatgatgtgggcttccccagccacgtggaactgagttgttgtaaggattctgtgataccgactccagcacacctggcatattagaccacctgactttcaacatgctgtccagtgtgtcgtgctggagacttcccacagcttgcctgccactacagctgaagaataggaatttgaggaccagtgggagccaagactctgtaaaatctgcttaaactattacatggaaaagagctgacacctcacatgtctgcacacaaacacagacctgtcagcagcgtcactcccaagcgagtggaattatccatctcttgctgatggtataaaaacaacgagtagacgaagcagatgattcagaggagaacagcagcatgttggaaagcatctgcctcaagtatcatttttgccaggtctctgcatgagtgaggttgtaatcatctgacaagtgtaagaggtcttctctgtgtcaatagtgctcaaaggaaactgtggtttcaagatttttaaaatcatctagagtgctttcctcattccagaacacaagtttcctctccattctcattaagacttggagttttgcataggggatctattgatgctgcacaataaatctttcttgccactctgccacatgtacatttaaattctgggactgatttgcagcacaaattgcactatagctgcaagagattagggtagtttcaaagttaccctaaaagacttctgaatactttgaattaatagttaactgacccgagcctgccgttttatttttccaagacttcaaaagtagttaacaaaaatcagctaatttcccatgtttaaataacataccactaccttagttatctcatagcccacagctttatcagctctatctttcacctaaaactcattccatgttctcaactgcgtgagttttagtaattgtgacactaccatatgccaggtgttatcaccacttcacttaccaccagaaatggggtcaggtccttgtttttgtctgctcagtatgtgttttatttccagaggcgcatcctgaggatctgtttccaggactagtaccagtgccaagagccttaacttgaattattagcactacctaccccctgcctttgcaaagcaactgaaggagggaaaactgctagaagggtacaatattgaggccataactgcaggcagctggcactgagttcctctctaggcctgtaaaggagcctggagaatgactctcagaattgctcaacaatggattgactggggagggcatttattctttagctcccgccttcatcctacattagttgaggcattggcaattggggcattattaccaggcatcctgggctattgaagttcaagctggcatatctatggtgaaagagacctagtgttagcttaaggccagacacttgtaacataagctatgttgaatcctgcacagagctgtcagccacttttcaaataagtggctgatgccaagcaaagaagaggtagaacacaaaaagtgtcagatacagaaacttgctttgctatatacgtcttgcatagtttttataagcttgcattcaaatttgaagttatttaaatatatacataagtaaataggctactagataaataaaaactaaataaatgtaatttttgaaaatctacacaatagaggtttcttactgaatggacttaggaatataaatgtaaatgtcctgattaatttctctgaatttttcacccaggttgcatattcttggtaagagaccgtatttttgatagcactgaaagaataataacttaaggctctttctctctttgtctctaatcttggttagacagcttggttcattccctagcacactgttgctttaattagttgctaggtgatgaatatcattctagagtagctggctgcctcttctattgcaagcagcaggattcctgggaccagggccaaactgagctctggaatgtttgataatatgccaacatctaaaccatcctttagctatatgtattacattgaacatgctatttattcttacttaattcaaagaaagttcagaggtctgattattttaattgcaggaaaaacaaaggagttttgaaaaaacagtacctgaataaaactatattaaatagataacatttaaaatgacaatttattttccattcttactttccaatagaattaatgctgaaggactgttaaacagaattttggtttcatactgtctctttctgtttatgctcataccccattctactaagcttcctctcattagcttcacatttatatcacttgtaatagcaatagctgtaatttctacagttcctattatgaactatgcactgtgatttataagaataattgaaaaatcagagttaattcatattcagcattaaaacaaatcttaagtatagtcacagtcatataatccaatgaaataaaaatgttcatgttgtaagtctatgttttttatatgccatgtttaaaaaacaataatttgatacatataaattt

SEQ ID NO: 88 - DNA, 923 bp, Homo sapiens
acactgcattggactttctggagtgtagattcttaaaggattaataggcagtcgcgatcatttcagactaaggaatctgcaatggagttctacaatcaaataaatcaatctttggagtattctcctctgccaaataatgatgtgaacagagctttctctcctctcagaataacttcaaatgggattaatctcatcttcaggaagatcccacattattatgtccttgcagaatttcctggactggaggaagttaaaaggaccttctctgttggaatccagataatagaataagaatagaaaaaaaatgaaaagaaaatcaacgagtatactaaactgacttgtctgatgagtgtaaaggtaaagagactaggaagagtgaagaaaatgcctgttctttcataagcaaagacttgaatgggcaggtgttatcaactggactccctgtaacattcattgttccacaagcaaacacacttgatgatgaggaaattattggcccagtttaaggataaaggcaagttctgtatgtacttaagcatttctagtgaatcatgtgaatgttctgaactgggaaacttcaaaagcaatttgccttaaaaatattaggtaataaattatagtctatattataataaaggtccatttttgtcaggtctatattagaattctctagtgtctatatggtaatttgtccaatatagtcctttttaacaacattcaagcttaaaaagcttgccattgtcttcattggaatataattattaattttatgactatgttgtaagttaaatgcttagcatgggaaatttcccatgtttcagactcatttctttatgagagctatgaatttttgtgttgtcagaaagcagtaactttcttgcagtatgccatattaaattgctgacaataacagattcatttct

SEQ ID NO: 89 - DNA, 1526 bp, Homo sapiens
tggcaaatataaaatctgcagaccaggttagaacgatggagacataggagagaattgatgtgttgtgagttcaaaggcaatctggaggcagaatttcttctttcataggggactgaaggctttctcccccaataccctcagtttaaggatgaagatgagacccacccacattatggagagtaatctgctttactcaaactttactgacttaaatgttaatcacatctaaaaaattccttcacagcaacatctaaactggtatttgaccaaacatctgggcatcatagcctagccaagttgaaacaaaaaattccatcgcaaagatgctgatgctgtatgagaggttaggagatttaaactccactctaatggaaatgacccatggagataggtgctgaagtttttggtctcaatagctgtctctaggctaaaatgtcttagctctacgttgccgttctttgagatactagtgtcttgtgtttatagattaaatagcttggctgtataagtactgaccaaaaacgtattagcttttccatagactctgaatataaaatacatttagcgactgcttcagtgttcacatagaagtaaagttatttttaaattaacctttgtatgtttttccagccttaatgtctttatatgagttcaagatgatgaacagtcttggtataacgtgaaatcatttgtgaatttggataagagcagtatatgcctattcaaaaatattattctaggtatctattatataacatggttacagtataaagctttttgttgttactctatacagctaaaactcatgaaatactcaattacagttgttagttaaatcaacaaaagcactctagaaacactgccaattagcttgctcagataagttttaatttgcatgtaaaggatgttagttaattaaatgtcaattgcttcctcaagatgaattattgctatttctctgtagttaactcgaaaacatgttgcaagaattttgagagaattttgtttagacagtaagtcaactgcatctattcaacctcttttttttagatttagcaaagtgagccaataattgtgtcttttattaaattttaatcaaatatttaattgcaattttatgttattgtgaaaacatatggcatatgatctagtattcagattagtattaataactacatttttgttgctgattttcaaatatttgttacatgtagaaaaaaatgggatttctgtctgcctaatgacattttttgagttagtaaacattttattagaaacaaatactgaaaatttccatagtacaaggagggtaaaatgttcattgtcttcttgaaaggtctagacagaaatcctaagactacagattaatatcatacaattgaagatgtttaaaactatgtgatctctagcattgttctgtgttttgaatataattatcctgtgtacattgatcttgcaagctgaaatagtaataatattagaaaagccaatcaataattatattaaaatctgagatttgctaagat

SEQ ID NO: 90 - DNA, 2312 bp, Homo sapiens
gagacataggagagaattgatgtgttgtgaggttcaaagtgcaatctggaggcagaatttcttctttcataggggactgaaggctttctcccccaataccctcagtttaaggatgaagatgagacccacccacattatggagagtaatctgctttactcaaactttactgacttaaatgttaatcacatctaaaaaattccttcacagcaacatctaaactggtatttgaccaaacatctgggcatcatagcctagccaagttgaaacaaaaaattccatcgcaaaggtaagagtttatatctaatcttgtgggaaagatattttattttaggtagatttgaggggatgagaatgacttcaatatgtatttgtaccactacaataaataaaagcccaagcatttctttcatgaattgttattttcagttttgggttaaagtgtttttttcttatcttactaaatttctgaagattaacacattttcagtttggtatatgtaattttatatcagtattcagtgtatagggaattagcaacttattttcacttctccagtgggaaaaattaaatgttctatacagtatcaggtgataattaacataaatccagtagaattacattatttccatttgattcccatttttgaaataaaaaatttcttatagtttctgacttaaatgctttgttcttattgaaattctaacaggttatgtttaaaaactgctacatatttaagttaaattcactcaagttatcaatgtaccaatttaataggaataagtcttttaaattacatttttactagcaggaaagcaagagccatcaaccagaaaaatgacattctaataatacgtaaacaatagacttagaaaaatatcaaacaattgtaactatgttaagatcagttttaaattcccagtttaaaaaaatgaaaaataaatgcataatacttagcaaaaattttaagatgttcaagaaagtttatgctctcttggcaattttcatttttagaaaacaaataattctcaattatggatgtaatcatcaaataatttattttctctccttttcatcatctttattattaaaatggagcttttattttgcagatgctgatgctgtatgagaggttaggagatttaaactccactctaatggaaatgacccatggagataggtgctgaagtttttggtctcaatagctgtctctaggctaaaatgtcttagctctacgttgccgttctttgagatactagtgtcttgtgtttatagattaaatagcttggctgtataagtactgaccaaaaacgtattagcttttccatagactctgaatataaaatacatttagcgactgcttcagtgttcacatagaagtaaagttatttttaaattaacctttgtatgtttttccagccttaatgtctttatatgagttcaagatgatgaacagtcttggtataacgtgaaatcatttgtgaatttggataagagcagtatatgcctattcaaaaatattattctaggtatctattatataacatggttacagtataaagctttttgttgttactctatacagctaaaactcatgaaatactcaattacagttgttagttaaatcaacaaaagcactctagaaacactgccaattagcttgctcagataagttttaatttgcatgtaaaggatgttagttaaatgtcaattgcttcctcaagatgaattattgctatttctctgtagttaactcgaaaacatgttgcaagaattttgagagaattttgtttagacagtaagtcaactgcatctattcaacctctttttttagatttagcaaagtgagccaataattgtgtcttttattaaattttaatcaaatatttaattgcaattttatgttattgtgaaaacatatggcatatgatctagtattcagattagtattaataactacatttttgttgctgattttcaaatatttgttacatgtagaaaaaaatgggatttctgtctgcctaatgacattttttgagttagtaaacattttattagaaacaaatactgaaaatttccatagtacaaggagggtaaaatgttcattgtcttcttgaaaggtctagacagaaatcctaagactacagattaatatcatacaattgaagatgtttaaaactatgtgatctctagcattgttctgtgttttgaatataattatcctgtgtacattgatcttgcaagctgaaatagtaataatattagaaaagccaatcaataattatattaaaatctgagatttgctagatgaag

SEQ ID NO: 91 - DNA, 1283 bp, Homo sapiens
cttcaacatctaaactggtatttgaccaaacatctgggcatcatagcctagccaagttgaaacaaaaaattccatcgcaaagatgctgatgctgtatgagaggttaggagatttaaactccactctaatggaaatgacccatggagataggtgctgaagtttttggtctcaatagctgtctctaggctaaaatgtcttagctctacgttgccgttctttgagatactagtgtcttgtgtttatagattaaatagcttggctgtataagtactgaccaaaaacgtattagcttttccatagactctgaatataaaatacatttagcgactgcttcagtgttcacatagaagtaaagttatttttaaattaacctttgtatgtttttccagccttaatgtctttatatgagttcaagatgatgaacagtcttggtataacgtgaaatcatttgtgaatttggataagagcagtatatgcctattcaaaaatattattctaggtatctattatataacatggttacagtataaagctttttgttgttactctatacagctaaaactcatgaaatactcaattaaagttgttggttaaatcaacaaaagcactctagaaacactgccaattagcttgctcagataagttttaatttgcatgtaaaggatgttagttaattaaatgtcaattgcttcctcaagatgaattattgctatttctctgtagttaactcgaaaacatgttgcaagaattttgagagaattttgtttagacagtaagtcaactgcatctattcaacctctttttttagatttagcaaagtgagccaataattgtgtcttttattaaattttaatcaaatatttaattgcaattttatgttattgtgaaaacatatggcatatgatctagtattcagattagtattaataactacatttttgttgctgattttcaaatatttgttacatgtagaaaaaaatgggatttctgtctgcctaatgacattttttgagttagtaaacattttattagaaacaaatactgaaaatttccatagtacaaggagggtaaaatgttcattgtcttcttgaaaggtctagacagaaatcctaagactacagattaatatcatacaattgaagatgtttaaaactatgtgatctctagcattgttctgtgttttgaatataattatcctgtgtacattgatcttgcaagctgaaatagtaataatattagaaaagccaatcataattatattaaaatctgagatttgctaagat

SEQ ID NO: 92 - DNA, 5817 bp, Homo sapiens
ttttttttttttttttttttttttacggttgtcttattattgaaatatagccaatttttatgttgattccatttagtctccatcctttaggtttaaaactacgtaagataataacataattctagatgtcaaacctacctagaaaggaaaagtcacttcctccccaatcccttccctgtttctacccagcccctggagataaccagtctctttcttttctaatttatccttccttatttctttttgcaaaaataagcagatacacaaaaggtattataaattctttcaaagaataaaccatctcctagaacccacaacccttcactctatagaaatctttctaattcatttacatggctgtatagtattccattgtgtggctatgccatggtttcttcaactaatctcctacatatgggcatttaggatgttcctaatatttttcaatgtatggtaaataatgctgcaataagcagatgtatttggatcttgttggagataatcttcaaggaaaattcctagatgtgagaatcctgggtcaaaaaataaatgttgtgtagttttcttaaatattgccaaatcctcctccataaggttctactattttgtttccccaccagcaatgctgacagagcctgtatcctcacagcctcaccacagagtgttactaaatctttgtaatgtttgccaatctaatgagaaatggtatcataatgtagttttaacttgccttcctctgaaagtgagcaaaggcaagcatctttttatgtgtttaagggtcacttatgtgatgcatgtgtgtgcacagacgtgtgtgtaaattttatgctctcagattttgcccatttttttcaagtttcttctcatttgttagtctattgggatatctgaataacactagtgtcgagaatcctcaaaggagagtacaattgcagttagataaacagagtgtccagaaaacagatggtctctgtgctcagtgaacttgaaagctgtggaaagcagacttgcttggaccatccaaacgcctacttcagctcaatcataaggccaagcagagttcagcgtccggcctgaggaagcaaaatccagcaagattctgaaacggggtctggtaggctgctttcttctcagagtcacaccatagcaagatcacacctctcccacccttacatacccctaaaacagaacagaagagaatggaatagaacagacccaccagcgtttagttattttgtcttgctcaacaccaacaacttttttaaaaaattatactttaagttctagggtacatgtgcacaatgtgcaggtttgttacatatgtatacatgcaccatgttggtgtgctgcacccattaactcatcatttacgttaggtatatctcctaatgctatccctcccctctccccccaccccatgaaaggccctggtgtgtgatgttccccttcctgtgtccaagtgttctcattgttcaattcccacctatgagtgagaacatgcgaacaccaacaaccgttttatggagaagttagcagggagcccggggagctccctgtgaccctcacattcctgactccccatctccatcacaggaatgaggagacaatcaagcacccctgcctaccatcctggaggagggaaggcattcgtgccagcctggggtgacaaagaaaggaggaggcctgcaccgagccaggcctgaggccccggaagcccccagtggctccagcaggctctgggacatggtggatggcgaggtgggcattcctgtggattcaaggactcacaaagctctggtggctgctttgttctgagacgtggtggcaaggagcctggctccttgcccatttttcacttgggattttccatagtgcttttccctcaattttaagactcttctatatggtagggtggagtatggtgagttgcgatctcaatgcgtggatttcgctgttggtgattggggttaggaggttgcattgtccaacttcctacttgactgtcctctgcagaaacacacattccctcctgttgcatattttttcttcatcatccagtatccaaagaatgcctcccccttctctttcaccctttcctccctcggaaatgaagacttctccagactgtcaccaagggtccctaatgctttcatgtccttttccggtcatcaaagcttggatctccgaggactttttctcagaattttcatatgcagtgtagattgtctcttcctgggcatacatttaactcatctgtaggccgtccatggtccttttctcttttcctacactgaaggacagttctctagatggccttgggctgatccagttctcgtatcatgtctgtcctgtagatctcaagaataattgtagaatagtatactgggaaagcaacatcttgagacagggaggaactggctgggacagcccaggctctgttcccatgcccccacctctagaacaggatgtccttcagtgccttagcccagtgtgtcatgttgccttcaggtataaaacccaggctgggctgctctctggggtcactcatctgctgtgcaagtgtgcagtgtggcacactaaatggagattccatcaacactgggcagctttcctgagctctggggaatcagctcccaatgaatctaggcctccttgctgcctatctgtaagtaataaacccactgcatgtcacttgctcgaggtgaaggctgggttctgtctcactggactcagataagttactaaccagtgcacagtgaacctgtttaacaaaattggcacagcaagcacggttcggtctgacagaagcatggcttattagtgaaacaggaggggtgataccccccagtttctaacacatggtggaaaggccagtctgggttgcagggtctgaacatgcatctggatgttttctggggatggaacagtgagaagtggaacaaaagtcacccacaaagatgtgaacaagctggctgcatgaacataggcagcagaaagggatgtggaaatgtgactgcagctcgtaatcctctggtttgggggcacttatgtaatcgctcattcctggggctggaaacttccaggagtgggaactcagtagcagcctgaggcacttgagagggaagaggaaagacagtctcagctgatccctgaggtctctgagtgagaaccaacatgagatgtgggacctgactaagagggagactttcttttcaaagggcagatacggagaaagcccagggaagtctcacacagcatggttagtgtggttgtttgaagaaggggtaatgcagacccaaatgtctggctggatggtgcaattaggggtaaggttaaggtctccaggtacccaccagagaccagtggtcctatactgctgtcaagctaaaaggaggaaagggaaaaaattaaactgatgacatcaggaagttttaggatgaacacagtgactgaaggtgtttatctgctttggataaggctttttgtgccattttgtgtggcagtgactgcagttcctacccctgagtgcattattacaggcattgacatgttggctgctctggtacagaacatcacggctgcctgagaagctctgcccctcacagccaagaatttgagccataacaatgggacatatccactcctgcctatcacctaagctacccaagtcccagtgggttattcaacaaaagctgtaccgcatactgagtgcagaagtgcacattgcttttttaattctggatttgatacaaaacatcctattgcaatgtaacagcccagtttgactggtcaaaaaggccttcggggcatgaagactaacaatggactgttgcaggctgaatgccaaggccacttggcatttcttggtttacagatggctctgggaaactacaaacagatgggatctcttgtggtttcccagatgtaacttacagctggccagccagtgaatggccatctcttgacttatactggacatagatgttctgcccaatgggccaacttcacacagtggtgatggccatgccagccacccctgctaccatatcttaatacatatgttttgactgatgggctgttcactctcaggtcacgaaaatgtcaaccaagtgactgaactattaaaggacctctgagtgggaacaaagactacaaccactcgctgcctaaaagggagaaatatctgtcacttgtgtggatgctgggactaccatggcaacccatgaaaagaatttatatcatctttttggatacactgcaggacttcactctgaccaaggaacagtctgctagtgggatagtacccctatctgactagggcaataaggacactaaacactgctctccagtgccagggaagcacagccctgagagcatgtcgggaaacattaggcttggtgagtgtggaggtggatcaggcagctgcttgattaggctacacctgtgaaatcccaataacagtattctcaaccgctctttttcctttctgcctttagaatgcacctcccaggggtggcttgtggtttgggcctccatagtaccccagacagggctcacaaaatctaaactggagatgatgcttccacctgttaactcccctatatggagtctcatagagtaatggataggaccaaggaataccaccatgcacaggtccctctgttggctccagggacatctgatctttccagtcgggtgagtggtgttttcagacatgtcaagtttttacagggtgtttcctccctttctggactgaaaaacagaggctgacaggtctgggttaagcaacaaggacagtgggtgccaaagaggtagtagcctctggactgggtgctgcaccaactgagcccaactcctatccaataagtagggaacacaagatactccagaaggtgtgggggtggggcaccaacctgtcattctattttctccacaaggacatggcagcagaggcctggaagcacaatgccttctttaggtcctcccaagctgtggtcactatgggtgatatgggttggatctgtgcccccacaaaatcttatgttaaaatgtaatccccattgttggaggtgccacccagtgggaggtatttggatgttgggggaagatccctcaaggcttggtgctggcctcgcgatagtgagtgagttctcacaagatctggttgttgtcgagtgtggcgcctccctccaaccctctcactcctgctttgctatgtgacgtacctgctctcgcttcaacttctgccctgagtgaaagcttcctgaggcctccccagaagcagatgttgatgccatgtttcctgtaaaacctgcagaatcatgagccaattacatttttttcttataagttacccagtctcaggtattccttcatagtgatgcaggaatggcctaatacaatgggtcaactgatgaagtgctggatcggccaccctagatcttattctgtcacagaccacagtggccctctcatcctgccatgaaagggaaccagaggtgccctgttttaacttaactggcctaaggtggcaaaatgtcatgaccacaattagtaaagccttggtgggctaatagtttaacatactactttcttttttcttttcttttctctcttttcttcttttttttttagacggagtcttgctctgtcacccaggctggagtgcagtggcatgatctcaactcactgcaacctctgcctcccgggttcaggcgattctcctgaacccgggaggcagaggttgcagtgagttgagatcatgccactgcactccagcctgggtgacagagcaagactccgtctaaaaaaaaaaag

SEQ ID NO: 93 - DNA, 5055 bp, Homo sapiens
ttttttttttttttttttttttttttttgtcttgctcaacaccaacaacttttttaaaaaaattatactttaagttctagggtacatgtgcacaatgtgcaggtttgttacatatgtatacatgcaccatgttggtgtgctgcacccattaactcatcatttacgttaggtatatctcctaatgctatccctcccctctccccccaccccatgaaaggccctggtgtgtgatgttccccttcctgtgtccaagtgttctcattgttcaattcccacctatgagtgagaacatgcgaacaccaacaaccgttttatggagaagttagcagggagcccggggagctccctgtgaccctcacattcctgactccccatctccatcacaggaatgaggagacaatcaagcacccctgcctaccatcctggaggagggaaggcattcgtgccagcctggggtgacaaagaaaggaggaggcctgcaccgagccaggcctgaggccccggaagcccccagtggctccagcaggctctgggacatggtggatggcgaggtgggcattcctgtggattcaaggactcacaaagctctggtggctgctttgttctgagacgtggtggcaaggagcctggctccttgcccatttttcacttgggattttccatagtgcttttccctcaattttaagactcttctatatggtagggtggagtatggtgagttgcgatctcaatgcgtggatttcgctgttggtgattggggttaggaggttgcattgtccaacttcctacttgactgtcctctgcagaaacacacattccctcctgttgcatattttttcttcatcatccagtatccaaagaatgcctcccccttctctttcaccctttcctccctcagaaatgaagacttctccagactgtcaccaagggtccctaatgctttcatgtccttttccggtcatcaaagcttggatctccgaggactttttctcagaattttcatatgcagtgtagattgtctcttcctgggcatacatttaactcatctgtaggccgtccatggtccttttctcttttcctacactgaaggacagttctctagatggccttgggctgatccagttctcgtatcatgtctgtcctgtagatctcaagaataattgtagaatagtatactgggaaagcaacatcttgagacagggaggaactggctgggacagcccaggctctgttcccatgcccccacctctagaacaggatgtccttcagtgccttagcccagtgtgtcatgttgccttcaggtataaaacccaggctgggctgctctctggggtcactcatctgctgtgcaagtgtgcaagtgtggcacactaaatggagattccatcaacactgggcagctttcctgagctctggggaatcagctcccaatgaatctaggcctccttgctgcctatctgtaagtaataaacccactgcatgtcacttgctcgaggtgaaggctgggttctgtctcactggactcagataagttactaaccagtgcacagtgaacctgtttaacaaaattggcacagcaagcacggttcggtctgacagaagcatggcttattagtgaaacaggaggggtgataccccccagtttctaacacatggtggaaaggccagtctgggttgcagggtctgaacatgcatctggatgttttctggggatggaacagtgagaagtggaacaaaagtcacccacaaagatgtgaacaagctggctgcatgaacataggcagcagaaagggatgtggaaatgtgactgcagctcgtaatcctctggtttgggggcacttatgtaatcgctcattcctggggctggaaacttccaggagtgggaactcagtagcagcctgaggcacttgagagggaagaggaaagacagtctcagctgatccctgaggtctctgagtgagaaccaacatgagatgtgggacctgactaagagggagactttcttttcaaagggcagatacggagaaagcccagggaagtctcacacagcatggttagtgtggttgtttgaagaaggggtaatgcagacccaaatgtctggctggatggtgcaattaggggtaaggttaaggtctccaggtacccaccagagaccagtggtcctatactgctgtcaagctaaaaggaggaaagggaaaaaattaaactgatgacatcaggaagttttaggatgaacacagtgactgaaggtgtttatctgctttggataaggctttttgtgccattttgtgtggcagtgactgcagttcctacccctgagtgcattattacaggcattgacatgttggctgctctggtacagaacatcacggctgcctgagaagctctgcccctcacagccaagaatttgagccataacaatgggacatatccactcctgcctatcacctaagctacccaagtcccagtgggttattcaacaaaagctgtaccgcatactgagtgcagaagtgcacattgcttttttaattctggatttgatacaaaacatcctattgcaatgtaacagcccagtttgactggtcaaaaaggccttcggggcatgaagactaacaatggactgttgcaggctgaatgccaaggccacttggcatttcttggtttacagatggctctgggaaactacaaacagatgggatctcttgtggtttcccagatgtaacttacagctggccagccagtgaatggccatctcttgacttatactggacatagatgttctgcccaatgggccaacttcacacagtggtgatggccatgccagccacccctgctaccatatcttaatacatatgttttgactgatgggctgttcactctcaggtcacgaaaatgtcaaccaagtgactgaactattaaaggacctctgagtgggaacaaagactacaaccactcgctgcctaaaagggagaaatatctgtcacttgtgtggatgctgggactaccatggcaacccatgaaaagaatttatatcatctttttggatacactgcaggacttcactctgaccaaggaacagtctgctagtgggatagtacccctatctgactagggcaataaggacactaaacactgctctccagtgccagggaagcacagccctgagagcatgtcgggaaacattaggcttggtgagtgtggaggtggatcaggcagctgcttgattaggctacacctgtgaaatcccaataacagtattctcaaccgctctttttcctttctgcctttagaatgcacctcccaggggtggcttgtggtttgggcctccatagtaccccagacagggctcacaaaatctaaactggagatgatgcttccacctgttaactcccctatatggagtctcatagagtaatggataggaccaaggaataccaccatgcacaggtccctctgttggctccagggacatctgatctttccagtcgggtgagtggtgttttcagacatgtcaagtttttacagggtgtttcctccctttctggactgaaaaacagaggctgacaggtctgggttaagcaacaaggacagtgggtgccaaagaggtagtagcctctggactgggtgctgcaccaactgagcccaactcctatccaataagtagggaacacaagatactccagaaggtgtgggggtggggcaccaacctgtcattctattttctccacaaggacatggcagcagaggcctggaagcacaatgccttctttaggtcctcccaagctgtggtcactatgggtgatatgggttggatctgtgcccccacaaaatcttatgttaaaatgtaatccccattgttggaggtgccacccagtgggaggtatttggatgttgggggaagatccctcaaggcttggtgctggcctcgcgatagtgagtgagttctcacaagatctggttgttgtcgagtgtggcgcctccctccaaccctctcactcctgctttgctatgtgacgtacctgctctcgcttcaacttctgccctgagtgaaagcttcctgaggcctccccagaagcagatgttgatgccatgtttcctgtaaaacctgcagaatcatgagccaattacatttttttcttataagttacccagtctcaggtattccttcatagtgatgcaggaatggcctaatacaatgggtcaactgatgaagtgctggatcggccaccctagatcttattctgtcacagaccacagtggccctctcatcctgccatgaaagggaaccagaggtgccctgttttaacttaactggcctaaggtggcaaaatgtcatgaccacaattagtaaagccttggtgggctaatagtttaacatactactttctttttttcttttcttttctctcttttcttctttttttttagacggagtcttgctctgtcacccaggctggagtgcagtggcatgatctcaactcactgcaacctctgcctcccgggtccaggcgattctcctgcctcagcctcgcaagtagctgggattacaggcacccgccaccatgcctggccaattttgtattttagcagagatgggatttcaccatgttggccaggctggtcctgaactcctgacctctggtgatctacacacctcagcctcccaaagtgctgagactacaggcgcgagccaccatgcctggcctgacacactacttttatttgattacatgaaagataagtgtcccagtggcaatgacgaaaacaaggacggcaataatgctagccctttctgaagggacattataaacaatagtgtagggtgaaactgagctcatgcaactatgacttagctgcaaatggctgtgcctccatacccattagtaggccactgaacaataaaatgggataaagggtgctatgtacccctgatagctacatatttctttatgggcagtctgagggtgacccaaaaatgggatgagcaatgtctgtgcctggaaatccagtggatgctgggtcctgcatgctggggtgacagagcaagactccgtc

SEQ ID NO: 94 - DNA, 2856 bp, Homo sapiens
ccttctccccggcggttagtgctgagagtgcggagtgtgtgctccgggctcggaacacacatttattattaaaaaatccaaaaaaaatctaaaaaaatcttttaaaaaaccccaaaaaaatttacaaaaaatccgcgtctcccccgccggagacttttattttttttcttcctcttttataaaataacccggtgaagcagccgagaccgacccgcccgcccgcggccccgcagcagctccaagaaggaaccaagagaccgaggccttcccgctgcccggacccgacaccgccaccctcgctccccgccggcagccggcagccagcggcagtggatcgaccccgttctgcggccgttgagtagttttcaattccggttgatttttgtccctctgcgcttgctccccgctcccctccccccggctccggcccccagccccggcactcgctctcctcctctcacggaaaggtcgcggcctgtggccctgcgggcagccgtgccgagatgaaccccagtgcccccagctaccccatggcctcgctctacgtgggggacctccaccccgacgtgaccgaggcgatgctctacgagaagttcagcccggccgggcccatcctctccatccgggtctgcagggacatgatcacccgccgctccttgggctacgcgtatgtgaacttccagcagccggcggacgcggagcgtgctttggacaccatgaattttgatgttataaagggcaagccagtacgcatcatgtggtctcagcgtgatccatcacttcgcaaaagtggagtaggcaacatattcattaaaaatctggacaaatccattgataataaagcactgtatgatacattttctgcttttggtaacatcctttcatgtaaggtggtttgtgatgaaaatggttccaagggctatggatttgtacactttgagacgcaggaagcagctgaaagagctattgaaaaaatgaatggaatgctcctaaatgatcgcaaagtatttgttggacgatttaagtctcgtaaagaacgagaagctgaacttggagctagggcaaaagaattcaccaatgtttacatcaagaattttggagaagacatggatgatgagcgccttaaggatctctttggcaagtttgggcctgccttaagtgtgaaagtaatgactgatgaaagtggaaaatccaaaggatttggatttgtaagctttgaaaggcatgaagatgcacagaaagctgtggatgagatgaacggaaaggagctcaatggaaaacaaatttatgttggtcgagctcagaaaaaggtggaacggcagacggaacttaagcgcaaatttgaacagatgaaacaagataggatcaccagataccagggtgttaatctttatgtgaaaaatcttgatgatggtattgatgatgaacgtctccggaaagagttttctccatttggtacaatcactagtgcaaaggttatgatggagggtggtcgcagcaaagggtttggttttgtatgtttctcctccccagaagaagccactaaagcagttacagaaatgaacggtagaattgtggccacaaagccattgtatgtagctttagctcagcgcaaagaagagcgccaggctcacctcactaaccagtatatgcagagaatggcaagtgtacgagctgttcccaaccctgtaatcaacccctaccagccagcacctccttcaggttacttcatggcagctatcccacagactcagaaccgtgctgcatactatcctcctagccaaattgctcaactaagaccaagtcctcgctggactgctcagggtgccagacctcatccattccaaaatatgcccggtgctatccgcccagctgctcctagaccaccatttagtactatgagaccagcttcttcacaggttccacgagtcatgtcaacacagcgtgttgctaacacatcaacacagacaatgggtccacgtcctgcagctgcagccgctgcagctactcctgctgtccgcaccgttccacagtataaatatgctgcaggagttcgcaatcctcagcaacatcttaatgcacagccacaagttacaatgcaacagcctgctgttcatgtacaaggtcaggaacctttgactgcttccatgttggcatctgcccctcctcaagagcaaaagcaaatgttgggtgaacggctgtttcctcttattcaagccatgcaccctactcttgctggtaaaatcactggcatgttgttggagattgataattcagaacttcttcatatgctcgagtctccagagtcactccgttctaaggttgatgaagctgtagctgtactacaagcccaccaagctaaagaggctgcccagaaagcagttaacagtgccaccggtgttccaactgtttaaaattgatcagggaccatgaaaagaaacttgtgcttcaccgaagaaaaatatctaaacatcgaaaaacttaaatattatggaaaaaaaacattgcaaaatataaaataaataaaaaaaggaaaggaaactttgaaccttatgtaccgagcaaatgccaggtctagcaaacataatgctagtcctagattacttattgatttaaaaacaaaaaaacacaaaaaaatagtaaaatataaaaacaaattaatgttttatagaccctgggaaaaagaattttcagcaaagtacaaaaatttaaagcattcctttctttaattttgtaattctttactgtggaatagctcagaatgtcagttctgttttaagtaacagaattgataactgagcaaggaaacgtaattggattataaaattcttgctttaataaaaatcctaaacagtg

SEQ ID NO: 95 - DNA, 6544 bp, Homo sapiens
tttttttttttttttttttttttacttcaagatttatttgtacttgtttttgtctttagactggggagatagagagagagagagagagatgatagatagatagatagatagacagatagatagatagatgatagataatagatagattcaaaatctacatatattacttatcttcttttaagtatggttgtcttatttattgaaatatagccaatttattttatgttgattccatttagtctccatcctttaggtttaaaactacgtaagataataacataattctagatgtcaaacctacctagaaaggaaaagtcacttcctccccaatcccttccctgtttctacccagcccctggagataaccagtctctttcttttctaatttatccttccttatttctttttgcaaaaataagcagatacacaaaaggtattataaattctttcaaagaataaaccatctcctagaacccacaacccttcactctatagaaatctttctaattcatttacatggctgtatagtattccattgtgtggctatgccatggtttcttcaactaatctcctacatatgggcatttaggatgttcctaatatttttcaatgtatggtaaataatgctgcaataagcagatgtatttggatcttgttggagataatcttcaaggaaaattcctagatgtgagaatcctgggtcaaaaaataaatgttgtgtagttttcttaaatattgccaaatcctcctccataaggttctactattttgtttccccaccagcaatgctgacagagcctgtatcctcacagcctcaccacagagtgttactaaatctttgtaatgtttgccaatctaatgagaaatggtatcataatgtagttttaacttgccttcctctgaaagtgagcaaaggcaagcatctttttatgtgtttaagggtcacttatgtgatgcatgtgtgtgcacagatgtgtgtgtaaattttatgctctcagattttgcccatttttttcaagtttcttctcatttgttagtctattgggatatctgaataacactagtgtcgagaatcctcaaaggagagtacaattgcagttagataaacagagtgtccagaaaacagatggtctctgtgctcagtgaacttgaaagctgtggaaagcagacttgcttggaccatccaaacgcctacttcagctcaatcataaggccaagcagagttcagcgtccggcctgaggaagcaaaatccagcaagattctgaaacggggtctggtaggctgctttcttctcagagtcacaccatagcaagatcacacctctcccacccttacatacccctaaaacagaacagaagagaatggaatagaacagacccaccagcgtttagttattttgtcttgctcaacaccaacaacttttttaaaaaattatactttaagttctagggtacatgtgcacaatgtgcaggtttgttacatatgtatacatgcaccatgttggtgtgctgcacccattaactcatcatttacgttaggtatatctcctaatgctatccctcccctctccccccaccccatgaaaggccctggtgtgtgatgttccccttcctgtgtccaagtgttctcattgttcaattcccacctatgagtgagaacatgcgaacaccaacaaccgttttatggagaagttagcagggagcccggggagctccctgtgaccctcacattcctgactccccatctccatcacaggaatgaggagacaatcaagcacccctgcctaccatcctggaggagggaaggcattcgtgccagcctggggtgacaaagaaaggaggaggcctgcaccgagccaggcctgaggccccggaagccccagtggctccagcaggctctggacatggtggatggcgaggtgggcattcctgtggattcaaggactcacaaagctctggtggctgctttgttctgagacgtggtggcaaggagcctggctccttgcccatttttcacttgggattttccatagtgcttttccctcaattttaagactcttctatatggtagggtggagtatggtgagttgcgatctcaatgcgtggatttcgctgttggtgattggggttaggaggttgcattgtccaacttcctacttgactgtcctctgcagaaacacacattccctcctgttgcatattttttcttcatcatccagtatccaaagaatgcctcccccttctctttcaccctttcctccctcagaaatgaagacttctccagactgtcaccaagggtccctaatgctttcatgtccttttccggtcatcaaagcttggatctccgaggactttttctcagaattttcatatgcagtgtagattgtctcttcctgggcatacatttaactcatctgtaggccgtccatggtccttttctcttttcctacactgaaggacagttctctagatggccttgggctgatccagttctcgtatcatgtctgtcctgtagatctcaagaataattgtagaatagtatactgggaaagcaacatcttgagacagggaggaactggctgggacagcccaggctctgttcccatgcccccacctctagaacaggatgtccttcagtgccttagcccagtgtgtcatgttgccttcaggtataaaacccaggctgggctgctctctggggtcactcatctgctgtgcaagtgtgcaagtgtggcacactaaatggagattccatcaacactgggcagctttcctgagctctggggaatcagctcccaatgaatctaggcctccttgctgcctatctgtaagtaataaacccactgcatgtcacttgctcgaggtgaaggctgggttctgtctcactggactcagataagttactaaccagtgcacagtgaacctgtttaacaaaattggcacagcaagcacggttcggtctgacagaagcatggcttattagtgaaacaggaggggtgataccccccagtttctaacacatggtggaaaggccagtctgggttgcagggtctgaacatgcatctggatgttttctggggatggaacagtgagaagtggaacaaaagtcacccacaaagatgtgaacaagctggctgcatgaacataggcagcagaaagggatgtggaaatgtgactgcagctcgtaatcctctggtttgggggcacttatgtaatcgctcattcctggggctggaaacttccaggagtgggaactcagtagcagcctgaggcacttgagagggaagaggaaagacagtctcagctgatccctgaggtctctgagtgagaaccaacatgagatgtgggacctgactaagagggagactttcttttcaagggcagatacggagaaagcccagggaagtctcacacagcatggttagtgtggttgtttgaagaaggggtaatgcagacccaaatgtctggctggatggtgcaattaggggtaaggttaaggtctccaggtacccaccagagaccagtggtcctatactgctgtcaagctaaaaggaggaaagggaaaaaattaaactgatgacatcaggaagttttaggatgaacacagtgactgaaggtgtttatctgctttggataaggctttttgtgccattttgtgtggcagtgactgcagttcctacccctgagtgcattattacaggcattgacatgttggctgctctggtacagaacatcacggcctgcctgagaagctctgccctcacagccaagaatttgagccataacaatgggacatatccactcctgcctatcacctaagctacccaagtcccagtgggttattcaacaaaagctgtaccgcatactgagtgcagaagtgcacattgcttttttaattctggatttgatacaaaacatcctattgcaatgtaacagcccagtttgactggtcaaaaaggccttcggggcatgaagactaacaatggactgttgcaggctgaatgccaaggccacttggcatttcttggtttacagatggctctgggaaactacaaacagatgggatctcttgtggtttcccagatgtaacttacagctggccagccagtgaatggccatctcttgacttatactggacatagatgttctgcccaatgggccaacttcacacagtggtgatggccatgccagccacccctgctaccatatcttaatacatatgttttgactgatgggctgttcactctcaggtcacgaaaatgtcaaccaagtgactgaactattaaaggacctctgagtgggaacaaagactacaaccactcgctgcctaaaagggagaaatatctgtcacttgtgtggatgctgggactaccatggcaacccatgaaaagaatttatatcatctttttggatacactgcaggacttcactctgaccaaggaacagtctgctagtgggatagtacccctatctgactagggcaataaggacactaaacactgctctccagtgccagggaagcacagccctgagagcatgtcgggaaacattaggcttggtgagtgtggaggtggatcaggcagctgcttgattaggctacacctgtgaaatcccaataacagtattctcaaccgctctttttcctttctgcctttagaatgcacctcccaggggtggcttgtggtttgggcctccatagtaccccagacagggctcacaaaatctaaactggagatgatgcttccacctgttaactcccctatatggagtctcatagagtaatggataggaccaaggaataccaccatgcacaggtccctctgttggctccagggacatctgatctttccagtcgggtgagtggtgttttcagacatgtcaagtttttacagggtgtttcctccctttctggactgaaaaacagaggctgacaggtctgggttaagcaacaaggacagtgggtgccaaagaggtagtagcctctggactgggtgctgcaccaactgagcccaactcctatccaataagtagggaacacaagatactccagaaggtgtgggggtggggcaccaacctgtcattctattttctccacaaggacatggcagcagaggcctggaagcacaatgccttctttaggtcctcccaagctgtggtcactatgggtgatatgggttggatctgtgcccccacaaaatcttatgttaaaatgtaatccccattgttggaggtgccacccagtgggaggtatttggatgttgggggaagatccctcaaggcttggtgctggcctcgcgatagtgagtgagttctcacaagatctggttgttgtcgagtgtggcgcctccctccaaccctctcactcctgctttgctatgtgacgtacctgctctcgcttcaacttctgccctgagtgaaagcttcctgaggcctccccagaagcagatgttgatgccatgtttcctgtaaaacctgcagaatcatgagccaattacatttttttcttataagttacccagtctcaggtattccttcatagtgatgcaggaatggcctaatacaatgggtcaactgatgaagtgctggatcggccaccctagatcttattctgtcacagaccacagtggccctctcatcctgccatgaaagggaaccagaggtgccctgttttaacttaactggcctaaggtggcaaaatgtcatgaccacaattagtaaagccttggtgggctaatagtttaacatactactttcttttttcttttcttttctctcttttcttcttttttttttagacggagtcttgctctgtcacccaggctggagtgcagtggcatgatctcaactcactgcaacctctgcctcccgggttcaggcgattctcctgcctcagcctcgcaagtagctgggactacaggcacccgccaccatgcctggccaattttgtatttttagcagagatgggatttcaccatgttggccaggctggtcctgaactcctgacctctggtgatctacacacctcagcctcccaaagtgctgagaccacaggcgcgagccaccatgcctggcctgacacactacttttatttgattacatgaaagataagtgtcccagtggcaatgacgaaaacaaggacggcaataatgctagccctttctgaagggacattataaacaatagtgtagggtgaaactgagctcatgcaactatgacttagctgcaaatggctgtgcctccatacccattagtaggccactgaacaataaaatgggataaagggtgctatgtacccctgatagctacatatttctttatgggcagtctgagggtgacccaaaaatgggatgagcaatgtctgtgcctggaaatccagtggatggctgggtcctgcatgctgggggtgcctgtagtcccagctacttgcgaggctgaggcaggagaatcagcctgaacccgggaggcagaggttgcagtgagttgagatcgtgccactgcactccagcctgggtgacagagcgagactccgtctaaaaaaaaaag

SEQ ID NO: 96 - DNA, 3335 bp, Homo sapiens
tagcacctttatcccattttattgttcagtggcctactaatgggtatggaggcacagccatttgcagctaagtcatagttgcatgagctcagtttcaccctacactattgtttataatgtcccttcagaaagggctagcattattgccgtccttgttttcgtcattgccactgggacacttatctttcatgtaatcaaataaaagtagtgtgtcaggccaggcatggtggctcgcgcctgtaatctcagcactttgggaggctgaggtgtgtagatcaccagaggtcaggagttcaggaccagcctggccaacatggtgaaatcccatctctgctaagaatgcaaaattggccagggcatggtggcgggtgcctgtggtcccagctgcttgcgaggctgaggcgggagaatcacctgaacccgggaggcagaggttgcaggtgagttgagatcatgccactgcactccagcctgggtgacagagcaagactccgtctaaaaaaaaaaagaagaaaagagagaaaagaaaagaaaaaaagaaagtagtatgttaaactattagcccaccaaggctttactaattgtggtcatgacattttgccaccttaggccagttaagttaaaacagggcacctctggttccctttcatggcaggatgagagggccactgtggtctgtgacagaataagatctagggtggccgatccagcacttcatcagttgacccattgtattaggccattcctgcatcactatgaaggaatacctgagactgggtaacttataagaaaaaaatgtaattggctcatgattctgcaggttttacaggaaacatggcatcaacatctgcttctggggaggcctcaggaagctttcactcagggcagaagttgaagcgagagcaggtacgtcacatagcaaagcaggagtgagagggttggagggaggcgccacactcgacaacaaccagatcttgtgagaactcactcactatcgcgaggccagcaccaagccttgagggatcttcccccaacatccaaatacctcccactgggtggcacctccaacaatggggattacattttaacataagattttgtgggggcacagatccaacccatatcacccatagtgaccacagcttgggaggacctaaagaaggcattgtgcttccaggcctctgctgccatgtccttgtggagaaaatagaatgacaggttggtgccccacccccacaccttctggagtatcttgtgttccctacttattggataggagttgggctcagttggtgcagcacccagtccagaggctactacctctttggcacccactgtccttgttgcttaacccagacctgtcagcctctgtttttcagtccagaaagggaggaaacaccctgtaaaaacttgacatgtctgaaaacaccactcacccgactggaaagatcagatgtccctggagccaacagagggacctgtgcatggtggtattccttggtcctatccattactctatgagactccatataggggagttaacaggtggaagcatcatctccagtttagattttgtgagccctgtctggggtactatggaggcccaaaccacaagccacccctgggaggtgcattctaaaggcagaaaggaaaaagagcggttgagaatactgttattgggatttcacaggtgtagcctaatcaagcagctgcctgatccacctccacactcaccaagcctaatgtttcccgacatgctctcagggctgtgcttccctggcactggagagcagtgtttagtgtccttattgccctagtcagataggggtactatcccactagcagactgttccttggtcagagtgaagtcctgcagtgtatccaaaaagatgatataaattcttttcatgggttgccatggtagtcccagcatccacacaagtgacagatatttctcccttttaggcagcgagtggttgtagtctttgttcccactcagaggtcctttaatagttcagtcacttggttgacattttcgtgacctgagagtgaacagcccatcagtcaaaacatatgtattaagatatggtagcaggggtggctggcatggccatcaccactgtgtgaagttggcccattgggcagaacatctatgtccagtataagtcaagagatggccattcactggctggccagctgtaagttacatctgggaaaccacaagagatcccatctgtttgtagtttcccagagccatctgtaaaccaagaaatgccaagtggccttggcattcagcctgcaacagtccattgttagtcttcatgccccgaaggcctttttgaccagtcaaactgggctgttacattgcaataggatgttttgtatcaaatccagaattaaaaaagcaatgtgcacttctgcactcagtatgcggtacagcttttgttgaataacccactgggacttgggtagcttaggtgataggcaggagtggatatgtcccattgttatggctcaaattcttggctgtgaggggcagagcttctcaggcagccgtgatgttctgtaccagagcagccaacatgtcaatgcctgtaataatgcactcaggggtaggaactgcagtcactgccacacaaaatggcacaaaaagccttatccaaagcagataaacaccttcagtcactgtgttcatcctaaaacttcctgatgtcatcagtttaattttttccctttcctccttttagcttgacagcagtataggaccactggtctctggtgggtacctggagaccttaaccttacccctaattgcaccatccagccagacatttgggtctgcattaccccttcttcaaacaaccacactaaccatgctgtgtgagacttccctgggctttctccgtatctgccctttgaaaagaaagtctccctcttagtcaggtcccacatctcatgttggttctcactcagagacctcagggatcagctgagactgtctttcctcttccctctcaagtgcctcaggctgctactgagttcccactcctggaagtttccagccccaggaatgagcgattacataagtgcccccaaaccagaggattacgagctgcagtcacatttccacatccctttctgctgcctatgttcatgcagccagcttgttcacatctttgtgggtgacttttgttccacttctcactgttccatccccagaaaacatccagatgcatgttcagaccctgcaacccagactggcctttccaccatgtgttagaaactggggggtatcacccctcctgtttcactaataagccatgcttctgtcagac

SEQ ID NO: 97 - DNA, 5817 bp, Homo sapiens; identical to SEQ ID NO: 92

SEQ ID NO: 98 - DNA, 5308 bp, Homo sapiens
atccgccaccgccgcaagacgccgctgcgcgccacttgggctcgagtcctaggccgcgccgcgcggccccgggcccagcagccgggagtcggcagctctcctctacgcccgtcccctcagggcggctgtggatgttgccagtattgtcgatgcttcagagcgacgtttgccctgcgacacaggcgggccggctctcctctgtctttattttcctggaggccgacaggagcggggcccgagttcggtggtggtcgtgagcgtgggggcactcaggcccggacgggctctcaggtcgccgacggcggcggctggaggccgcgctggctgtccaggtcgtcgttagctttagggagccgatctccgggcggccccacagaggacgcccgcgattcgatggcgatgatgcccgttttaaatggtgtccctgcagccgggtggatggatggatcgtacaccttgccttttgagagccgggaccttacgcccgactgcgtgttatttctgcgaataagaacgcaacctttggaggtgaagacgactgtcggctggattgaattggaatcgtgtttgtgatgatgcgtttatttctggaatacgcggtctccgctgcttttgcttttgtcggcagaggtttgggttcttctctaacggtcaggataaaggcctgtaggcgacgctgcgcgagcgagaagctcgcccgcggctgcccgggcgcccccctctaggtgtgggtggagccgagcgcgcggggagaaccgccgccccgactcagccaccggtgactgcgggcgacccgcgggcctgcggccagctgatttcaaacatcgttttcctctttaggttcggaaaactgaggcgctggacaaggctggaatacaatatgtgattatacgtacagtactatggttgttgtagtttttaaattgtaaaacaagaagtaaccattgttccaccgttctctattaagtttgtgtaaattaaaaaggggctattttcggtaaaagtgcagtaggtaagcggaattttactcaaccgggacgaaattcgtgttatatgaattgtattgtgtatttgtgtgtgtaccagtgcgctaaaagtaagtaggaaaacttgcttagattattccttttgcctcaggccactcagggggccaagatcctgtcactccttttctctaggccctgcgaatggcttcccgtcttgaggggagtgagccaaagccttgactgcggcagaagtccccgcgcgccgttgagggtgggggcgggcctgccctggcatccttgcgagtaggactcttccctgagcgtcgtccacagggcttgctccttcaccttcaggattttgctcgtgtcactcggtgcttccgcggctacttttaaactgaaagttccctagcccccttctcattttatcctttggacagtctacatatccatacttgtttatcttcttatctctccttccccagtgcaatgtaagctctaagaggacaagaggttgtgttttctgcactggtgttacggcccccgcctagaatgccacacagtagatgcgtagtatgtggttaaggaatgaatgcgattataagggccttgatgctcccccatttctgtctttaatatgtacttatatgctacagagagctttataaaagatttaaaacacgtttattacagaattctataaaaatatattgcttctaaacattggaaagccctccacaacaccagaaacccacaaatgagggataaaatttgtttttaggcttctgtaaatgagcatgcccgaggacagtgcatcaaatgatcatatccatactgggccgattatgtttgctcttctgagtctcaaactgcattcttcatctgtcgtcctctgtctttcaaaatacattaaaagtgagaatttggttggctcagagcaaatccagcactattggaaaagttcattcagcaagtatttattgggcacaaatgggtaccaggcacgctaattcaaaaggtgtgtgtttctgaggctagaaggccttacataaaggaccacatgtggctactttggttgctactcaattatgctgtcaagcaaagcaaatgctagtgaaatttatttttagttttcttctgaagaaaaggttcaatgaaagctgaggtcaggcttggtgtggatattttaattcaccatttagtttgctgtttgcttacacttaggttagcattagatatacttaatcatgatttttgagtactataaaacgtgagaaatcttatttcctagtggctggaaaaacaggctttttaaattaaaataaggtaaatatatcagtaagctagaagctatgcaataaggctttggctatggtattacaaattttcatatttcatgtattgaatttttggacaagaaagacagccttgataggtattttataaccattaatacaattaatcaaacattgtttagtaaatccaatcgtctattcattattatttttcccattaatcttcagaacagctttaagttaatacagatgactcagaatgtgtttttcactcagtttcaaaataccattatttcaattcgctaatagaagcacaattatcttcttgtctgctttcttaaatgttactggtaaactagtaattttgcatgtccaggtaactgcagctgctacagtcaatctgctttggaaagtcttggcattattgtgtcatttaatttaaaatttttaagttttttagtttcttcccttattgaggacttattaggcgctaattagctttatgctagacatctcatgcatggcagtgaatgaaaacaacactgcctttgagggttttaacttgtatatagtttataccatttttttttccaggttatagaatcaaagaaattgtttcaattcatatcacagtatttctctattaaatcaaatggtattttgcttgcataaatttaagtatccaagttgagatcttacatagaatctgttaatctaatattagtgttttcttcatttcattgtcttgggttttttttttcttaataattatttttcccaataccatccatttgttttgctcttacatttttaagtcttttatgttccaaatcaggtgacttacatcctccacttgtccattgaggatagcccagtaaacctttattctgactttaaattgcctccttgcttcaagaactgagttgcatgactcagttttctttgctagaaatatccctggatagtctcgtatgtattcttgatcaatgaattgcagaagatttgattaaaattttaaatggatttcagggataaactatttgtatcaaatgtcatcaccaggaatttctacaactgaaaaatttgaattgttatttttattgaagaatatttatctttaagataaatgcaacttgctataaaatgatagaaatgaaaaattttagaaaatcattttctactcactattttatgcctgccagttatcctttgttagtgataaaattgtcttttatgggaacgaatttgttaaaggtagaaaaaaaactggtagtgtatgtatgttttatagattagacactaccaaaattatttacatttagaataattaacttgctttcaggatgacagatgacttaagaaactgatgaagggttaattaaggatattgatttttagggcagaactacaaaattatcaaatcacttaacactgtaaatatgttcctgtttcaggttttcaaagtaaataccttaatcaaatttggaaatagtatttatggattttattcaacatagattatctattttgttaaaattatagaaatgaacagttcttttcccatggatgccttttttcatcttggcctattctgatcctttaagaacaagctttgtcctttcattaatacttctcacctataattacgaattttctctaaacttgtagattttattatccatgccatctatttataatcctatgacactcctatattgtttatggtttttttgtttttttttgtttttttttttagacgaagtcttgctctgtcacccaggctggagtgcagtggtgcaatctcggctcactgcaagctccgcctcccggttcacggccatgcttctgcctcagcctccccagtacctgggactacaggcgcccaccaccacgcccggctaattttttgtacttttagtagagatggggtttcaccgtgttagccaggatggtctccatctcctgacctcgtgatcccccggcctcggcctcccaaagtgttgggattacaggcgtgagccactgtgcctggccttactgtttatgttttcatgcatctataccttatgttactaaatcaaagtgaccagttccacattatactacaagtttcactgtgtaatgcataagaattacacagagggaagggcctcaaaaaatgcacttctgaagtattttaatgtaaaattatttaagaccataaagtttcatgaaagcctaatctttctggaacctacacatactctgcatgtgaaccagagttaaactagtcaagtattttaatactgaactaatctggaaaaacatcatttaaaaaattactgtatttatgaaggaagaatataaaatctgttaaaaacttaaaacatctaaaataggtatgaagagaggcttatggtgctcattttaacagcattcttgagtaggttaccttgcagtcaaagcatctgctccagaccagtgttttaaactgtggattatggtaccactatgggtcatgaaattaatttattgcattatgactagcattttttatttaaaatagagaaaagaatagaaaataaaagcgtacatcacagatggtaagggtatgtgtttttaagtaaacatttgttcatgtgtatatgtgttagattaccttgtaaaacatattccttattgtgggttacaggccaaaaaaagtgtttgttttgtttttaaaaatctacagttcagattttccttagaaaatggggaaaaaaggaatgttagaaagatctgactgcctatgaactagtgaaggattttagaggaagtaccaggctattttagagatctgatactggttcagaaaggtaatcttaaggcaaagggtaggaaataaagttatgttgttagtagaaatgtcaaatacggttaaagttgtgaggaggaattattttcctagtggacctacatttgttgtgtgtagatctgtgactattactgatctgttgtagcacattttccatctaaaatgtccgatacagcacataataaacatggggc

SEQ ID NO: 99 - DNA, 2819 bp, Homo sapiens
tcctaagtcggaacttgattgggtgagaaatcacattgtgactattccacgacttgaacaaggggtagaaatcgcaggcaccgcgaaatagaaacttcctaggaccaagaagccaacgacgcccgaaaccgtggggtcctgtcacagaaaccccagcagcgcagccaccggactgggttctggaggccgagccgcagtccgtgcggcggcgctgggaagagaaggcgccccggcagctcccctgccaccggccccgaggagcggctggctcccccagcccagcgccgccgccgcccggtaactccaggcgcaactgggcgcaactggggcagctgcgacaccgaatccctcacatctgcaacctgggtgctgcggccactgagaaaatggaggcgcagaccaacgagcggtgccgcgaccgagagacctcggctggcgaaatggtggtgccgggagcctgcgagtgacgccagccggcggggttgtcaaggacaacattcgttttgacgcagccaatggcgccgtcaccaagaaaccatcgactctgagaaaaaagagaggttcggccaccgagaaactccgtacgacaagtgctgtggcagaaaaaccgcctactccgcgccacaggcaaaacagccaatggaaaccccaggtgctgcgaccgtgacaccggcactagagggtctcggatggagaaagcggcgcacggagaccaggaaactatgtgtagcacaactagcagaaaaccgtctggtcggccatccgggagaaagcgcggatcagaaacaagcgacttcgatgcagggaaccgcgcagccactgaagaaagtgacccacgtggcagtggtgccagcgaaacactgcagtttggacggcagctgtggggatgccacagagaaacatgcactgccactgaagtacatccagctccgcggagctagtgttcatatgatcaagaaaccgccagttgggctctgctagaaacttttagtcctcccttaacggctatcctacccacaacagacaatgcctttacccagcacctagcggtgctgagacccgcctgggccagcacagagcgcagagcagtacgggtacggagaaacgccggactcagtgaaaccagccttgcctccagcggattccccggcttcgccggacgccacaggcagagtgccgcggggaaacctctggctccctaaaccgattagattgtgggagtgggggggacactcacaagttgtgtggaagggaaccagcggcaatgggacccggcgagcacttgcccgcagcaaatgcctgcgctgctgcaaaaaaaacaacttttggcgcaaagaatgttgcggccagagagcatccgctgtcgctgacaaaggagtagcaatggcaatgagaaaccgccggcgccacggccgaccgcggcggctcacgcctatgatccttgcagtttgggaggccgaggtgggcgcattacttgagatcaggagactagcctggccaacaaggtgaaagccccatctctactaaaatacaaaagattagccggttgtggtggcaggcacctgtaatcccagctactccggaggctgaggcggaagaatcgattgaactcaggaggcagaggttgcagtgagccaagatcgcgccactgcactccagcctgggagacagagtgagctccgtctcaaaaaaaagaaagaaaccgctggcgccgggaaaggagccgtgcagcgatggacccatggtgcgctccgtgctaccaaagtgctgtggcctctacccactctcgattcccaaggctgtttttcgggcttagggaagtctgttatatttttatttctgcttctttctttctttcttttatttctttctttctttttctttctttcattctttctttttctttttctttcttctttcctttctttctctctttcctttttttctttttctctttatttcttttttctttattttttttttaacagtatcttgctctgttgcccaggctggtgcagtggcgtgatcactgctcagtgcagcctcgccttcttgggctccagctatcctcccgcctcagcctgtggagcagctgggaccacaggtgcgcgacaccacacccgactaattttttgtagtttttgtagggtctcgttttgttgcctaggctgttctcgaactcctgagctcaagcagtccgtccgcctgggcggactaatatcacaaagcgctagaatcacaggcatgagccaccgtgctgggagggaagtctgtattgttgctgcgttcaacccagtgcatagtgcatgagaagaggaggcagtttaggggcccagaaccaagcggatggggctggttgcaggaacaaagtaaaaaccattctgattgccaacagctgcctacgcaggaaacacccttccaacctccgtggcggggctctcccaggccacccctcggtcccagagtctcctccccgtccagagctctcaggatcctacagaaggggcggacaactcttcccttccaaactggaaagtcggcctaggtttccgaggataatgaaaggcacagcgttttttgacctcgacttcaggcctgaccccccactctctcggtcccgtacctcttctgcgggatgtaactctgtgggaaccgctcctttattctgatgattaactgtctgatatccttgatatttggggatagtagatgaaagagagcaggagagaaaaatggacggcaagactccagctcagaaggtgggaatgatggcaaaagtccgctacctctcaagctcaataaacatctcaaactgctct

SEQ ID NO: 100 - DNA, 3274 bp, Homo sapiens
ttttttttttttttttttttttttttttttgggacagagtctcgctctgtcaatccaagctggagtgcatgagcactctctcactgccacatccacctcccgtgttccagtgattctcctacctctgcctccctagtagctgggattacaggcacccaccaccacgcccagctagtttttgtattcttaatagagatggggcttcaccacgttggccaggctggtcccgaactcctgacctcatatgatccacctaccttggcctcccaagatgctgggaccataggcaggagccactgctcctggccctctgttttatcttgatgttgctgtatgttgtcttttttcattaaagttcagattttcctagttcttcgggcatgtattgtaccctggacattttggtattataacactctagatcttactcaaatcttgttttagcaggccacctttgacacaattctggtggaggggaaatggggcacagtctcatcactaccaggtagtggtgaaagtccacgttctctgctcaggctttttgacacccagggtagggaaacagaagtgctttgtgacatctgggcagctgtggaaattcagcctcttcaaaggcctccattgacatcagtctggctaggaaaggaaggagcaccttgttactgattgccaggtggcctccactgattctatagtcaagagtaggaagcctccttacctctggatggtggtgaaagttctgacatggcttcctctaatgaacagggttgcctctttactactgggtgggtatgtaagttcagaaccaccacatggccttcttactgctgcagggaggaaagtcctgactcccaactcagtcttctctgatcaccccaggggcaggacaccatgttatagctcaacaagggtggaagctgaggtccactacttttggcctttttggacaggggtggtggtagggtggtatttttccatggtgtttagctgcagtagggtggttatagttgaaaagttttctgtcttactgtgttgcctctttcctcatccttttgatagagcaaagttttgggaaacttttatcttccattggtgttttcaaggttatgatcttctctagcatccagtctggtacgtataaggcaaaaagaaaactgctgtgtccctctttgtgtcccaaagtccctaggcagtctgctgccttcgctccacttttcagatatttcctaacatgtatattacatataatgtgcaaagttttaagctacaattaacaggaggaatagagaggagtgtgtctactccatcttagtctgaaactagaagtcctctctttcctttaaaacattttcaaaatatttattctctaatatgaagagatatttaaaacattttcaggatatttattctctaacatgaagagtctttttttgtttgtttggtttgtttttttaagaaatagggtctcactctgtcacccaggctagaggctagagtgcagtggtgagatcactgcagcctcaaactattgggctctaacaatcctcccacatcactgggattacaggcgtcacctactgtgcctgggttcttaagtcttctaaccaatataaatttttaaattttatttatttatttatttattattttttgagacagtcttgctctgtcacccaggctggagtgcagtggtgcaagctcggctcacggcaacctccacctcccaggttcaagtgattctcctgattcagcctcccgagcagctggaaccacaggcaccacgcctggccaatttttgcattctcagtagagacagggtttcaccacattggccaggctggtctcaaactcccgacctcaattgatccatctgtctcagcctcccaaagtgctgggatcacaggtgtgagccaccgtgcctgcccaccaatgtaatattttttttttttttttttgagacagagtctcactctgtctcccaggctggatgcagtgtctcgatctcagctcactgcaaaatccgcctcctgggtttaagcgattctgcctcagcctcccgagcagctgggaccacaggcacacaccaccatgcccagctaactttgtatttttagtagagacggggtttcgccatgttggccaggcaagtctcgaaatcctgacctcaagtgatccgcctgcctcggcctcccagagtgctgttctgcaggcgtgagccattatgtccggcctataattttaaattaggatgaatgtcttctaattgttgattttaggagagctctttatgtatttgagatgtgaattctttgttggatagttaccatactttctcccactctgtgggttgccttctaactctgtctaaagatgtcttctttttctacagacagaaatttataatttaaattggcacatttaaattttaaaaatatttagaactttttctattatctttaagatactttttgtctacttgctaaacttttttttttttttgagacagagtctcactctgtcgcccaggctggagtgcagtggcttgatctcagctcactgcaacctctgcctcctgggtccagcaattctctgcctcagcctccagagtagctgggactacaagcacgtgccaccacgcccggccaatttttgtattttttagtagagatggggtttcaccatatcggccagactggtctagaactcctgacctcgtgatccgcccaccttggcctcccaaagtgctgggatcacaggcgtgagtcaccgtgcccggcctgctaaaaaaatttttttttttaacagaaaagccaaaaacattggcttctttgtaatatgcaactgtcctgaagcaaacacaaccctttgcttgcgatcattatactaagtatgaatatcatgttccacagtcaaagaacaaccagaaaacactttgacccaaatataagctaaaaataagggaaatcttgtcttatatatttttttaaaaaaacctggccaggcgcagtggctcatgcctgtaatctcagcactttgggaggccaaggtggggtagattacctgaggtgaggagttcgagaccagcccggccaacacggtgaaaccccatctctaccaaaaatacaaaattagccggacttggtggcacatgcctgtaatcccagatactccggaggcctaggtggagaatcgcttgaaactgggagatgggaggctgcagtgggccagatcggccatcgccctccagcctgggaacagagaaaattcgcgtatc

SEQ ID NO: 101 - DNA, 3148 bp, Homo sapiens
aatgcttctgggatatttctgacaaagatgtatatgcttcattcatacatgaggaaacatcacacatactcaagatgggagagccattctaaaaaataactaggcagaaatcttcaaaaatattaaagtcacggaaaccaagaaaaaatatgaacctgtttcagattaaaggaaactaaacagacctaacattttaatacaatgtttgattttgaacttgaactttttgttatataagacactattgagacaagtgctaatgcttgaatagggctgaaggattagattataataatacattaatgcaaatttcctgattttaaacattgtagtttgattgcacaaggagaatgtctttatgtgtggaaaataaatagtcaacattctgtcttcaagcttctgagaaaactctgcttttagggcatagatagaagtggatgataattcacctgttcctctgctactaattgagctgctctctgtttccatggctggctcatgggatgagagaatatatctagttttttatgtttcaatttgtctctctatggcatttttgtgaaaataaggaagtgtggagacttatatatgtttctaaattgtaatagttcattaatgtaaagtacagacacagtcttcacttttccttcttagaccgtttaaatatggccacgaaacaagtagtctctggttggctggacactgtggctcatgtccttaacaccgacactttgggaggccgaggcaggcaaatcacttgaggtcaggagttcgagaccagcctggccaatgtggcaaaaccccatctcttctaaaaatacaaaaattagctgagtgcggtggtgcacaccggtaatcccagttgctcgagaagctgaggcaggagaatcacttgaacatggaaggcagaggttgcagtgagccaagaccgcaccactacactccagcctgggcaatagagcaagactccatctcaaaaaaaaaagaaaaaagaaaatagtctctggttaaataacctctgaaagactccaccaaaaatttcatcttagcatttctccccaaacttcaggtaaaataaaatagagttgagagaaaaatagaaaggcaagggagtacctgttcactatttttattaaaccagtgttctactttattttaggtgtatcttttcttatttaaatgtcagctaaactttctttttaagatattgaatgaaagatgcccgtccttcaggtttcgtttaagcaagaatccccattctcaaataatataatataaactttccaaattcttaagtagatcatctgagattgaaagctaagtttaactttctcaaagatattttagccgccatgacacctagacaaagtggtatattaaattctgattaatttggtcctaaagcacctaagaatcattcttactttcttatccacaggggttattaagttttcacattaaaaaaaatccaacagtgaataatactgcattggggttactgtaattgttaagtaaaataagaaatacaaatctttagttagatcacatggcacctgactactgcttagaaaatggtaagacttactacataaatcatgagtcactattgacatctactatatcatatcataggttaggtatctaattataaatagtcaaatcagctgactcaaggtggcatagctcaagcagaggaagataatacaagttgagtatggatttaacactctaaacctgtcagcactgtaggaaaagtaacttaaaactgcacaccccacttatgcataatcatcagatataaagagggtacattcctgtaatttattgttgctctagtgatcttaaagaattaagtccacattcataaagtccaaacttgtctccaaggatttgctttgactttgggagtatctggatcattaagtaatttccggaggtcagagtaaaagctttttatctctaaatattacttccctggaatattagatgtagcagaagtcagtaacggagtgacctttctcttaaacaattcatagattcactgaaattttcttcaactttaggaaaattaaatatattccacagtgctgtaagtcttaaatattgattttcctctgaaatcttgactcatcctacccaccaacattctccctttgtacactatgttctttgtaatgttcatgttacacaagtgaaaattagtaacattagtaaattttcattgcaggtttatttgttcatatttctggatatataatccattactgttaaacttcatatcaatgttccgatatttcttcatcttatgttttatgttacaaaacaggttatttcactatatgtatgtttaattgattaattcttccctttttttggaaatgaaacagcactctcaattattgggacagaaaagttatttcatagggaatacttcaaacactgatatctacaacaggcagtaagattcgtcacaacaattggtatactgtcaatataccatacaaagttccatctggtcttgattaaaaattattttagttttctcaggaaaatgatacagagggagaattgcctagattatatgagagaaaaaaaagtagagagaaacataatgttttcttagattattacagcagtgaactatttccacctggtaagaagggtgcacttgagaatggggttcaagtactctaggaacatagatgtaagttctggatgcacagtagttgttgcttagctgtaagctggaaatttcaaggcagaaacagcagataccacaactataactgggtctccttgttttttgttttatgtgtatacgtgagattatggggaaagacaaaagtaatgcatagagatttattttttaacattcaattcataagcagtgtttatacctctttgtacttacttgaaaagtgtatattatgtaaatttagtataaaaacacttggactaattcataccatgtggtaaaatttcacattcaaaagaaatacccttctgttattaaaaataaaaaaaaaggagccaggagggtggctcatgactgtaatcccagtgctctgggaagccaaggtggagggatcatttgaggccaggactacttgagaacagcctgggcaacatagctagatcccttctctac

SEQ ID NO: 102 - DNA, 2090 bp, Homo sapiens
acttcaggtaaaataaaatagagttgagagaaaaatagaaaggcagggagtacctgttcactatttttattaaccagtgttctactttattttaggtgtatcttttcttatttaaatgtcagctaaactttctttttaagatattgaatgaaagatgcccgtccttcaggtttcgtttaagcaagaatccccattctcaaataatataatataaactttccaaattcttaagtagatcatctgagattgaaagctaagtttaactttctcaaagatattttagccgccatgacacctagacaaagtggtatattaaattctgattaatttggtcctaaagcacctaagaatcattcttactttcttatccacaggggttattaagttttcacattaaaaaaatccaacagtgaataatactgcattggggttactgtaattgttaagtaaaataagaaatacaaatctttagttagatcacatggcacctgactactgcttagaaaatggtaagacttactacataaatcatgagtcactattgacatctactatatcatatcataggttaggtatctaattataaatagtcaaatcagctgactcaaggtggcatagctcaagcagaggaagataatacaagttgagtatggatttaacactctaaacctgtcagcactgtaggaaaagtaacttaaaactgcacaccccacttatgcataatcatcagatataaagagggtacattcctgtaatttattgttgctctagtgatcttaaagaattaagtccacattcataaagtccaaacttgtctccaaggatttgctttgactttgggagtatctggatcattaagtaatttccggaggtcagagtaaaagctttttatctctaaatattacttccctggaatattagatgtagcagaagtcagtaacggagtgacctttctcttaaacaattcatagattcactgaaattttcttcaactttaggaaaattaaatatattccacagtgctgtaagtcttaaatattgattttcctctgaaatcttgactcatcctacccaccaacattctccctttgtacactatgttctttgtaatgttcatgttacacaagtgaaaattagtaacattagtaaattttcattgcaggtttatttgttcatatttctggatatataatccattactgttaaacttcatatcaatgttccgatatttcttcatcttatgttttatgttacaaaacaggttatttcactatatgtatgtttaattgattaattcttccctttttttggaaatgaaacagcactctcaattattgggacagaaaagttatttcatagggaatacttcaaacactgatatctacaacaggcagtaagattcgtcacaacaattggtatactgtcaatataccatacaaagttccatctggtcttgattaaaaattattttagttttctcaggaaaatgatacagagggagaattgcctagattatatgagagaaaaaaaagtagagagaaacataatgttttcttagattattacagcagtgaactatttccacctggtaagaagggtgcacttgagaatggggttcaagtactctaggaacatagatgtaagttctggatgcacagtagttgttgcttagctgtaagctggaaatttcaaggcagaaacagcagataccacaactataactgggtctccttgttttttgttttatgtgtatacgtgagattatggggaaagacaaaagtaatgcatagagatttattttttaacattcaattcataagcagtgtttatacctctttgtacttacttgaaaagtgtatattatgtaaatttagtataaaaacacttggactaattcataccatgtggtaaaatttcacattcaaaagaaatacccttctgttattaaaaataaaaaaaaaaaggagccaggagggtggctcatgactgtaatcccagtgctctgggaagccaaggtggagggatcatttgaggccaggactacttgagaacagcctgggcaacatagctagatcccttctctacaaaag

SEQ ID NO: 103 - DNA, 2472 bp, Homo sapiens
gagttttcctgcacaagcagtttggcttgctgtcatctatgtaagatgtaacttgctcctcttgcctccaccctatgattgtgagacttccccagccacgtggaactgctcataggcagaagggactagctttgtctcagatgagactttggatttggacttttgagttaatgctggaatcagatctttccaaaatctgacggcagaggaagaagaacacaaagatataaacatccagaaggaagaaattgagaagtcacaaagacaatttcactgggaagagttaggctggaactgaagagacatttcaaacaattccagcatgaccaggtcacatgtgtcaaggagattcagctcagtgctcttgccatcataacagattttgacttattcagatgtctatgtaaatcaatgctaaccaagtgttgtatctaatatgcctcctatgtttatatatgcattaattaaattctgagggttattatcaataaattggccagcaaagaataaaaatgtccaccacaaaaattattaaagaattgtatgcacataaactaaaaaaaatagaagaaacagataaattctgggatgcatacaccctcccaagattgaaccaggaagaaattgaatccctgaatagaccaataacaagttctgaaattgagccagtaataagtagcctaccaaccaaaaaaagcccaggaccagacagattcacagctgaattctaccagaggaatgaagaagagctggtcccatttctactgaaactatttcaaaacactgaaaaggagggactcctccctaacttattctaggaggccaacatcatcccaataccaaaacctagcagagacacaacaaaaaaagaaaacttcaggccaatatatttgatgaacatcaatgcaaaaatcctcaataaaatattggcaaattgaatccagcagcacatcaaaaagcttttccaccagaatcaagttggcttcatctcctggatgcaaggttggttcaacatatgcaaatcaataaacataattcatcacatgaacagaactagagacaaaaaccacatgattatctcaaaagctgtagaagaggcctctgataaaatttgacatcccttcatgttaaaaactctcaataaactaggtactgaaggaacattcctcaaataataaaagtcatgtattaaaaacccacagccaatatcatactgaatgggcaaaagctggaagcatttcccttgaaaagcagcacaagacaaggatgccctctctcaccaatcctattcaacatagtattgaaagttctggtcaaggtaatcagtcaagagaaaaaataaaagatattcaaataggaagagatgaagtcaaattatctttgtttgcagatgacatgttcctatatctagaaaaccccatcatctcagcccaaaagcatcttaagctgataagcaacttcagcaaagtctcaaaatacaaaatcaatgtgcaaaaattgctagcattcctatatacaaacaacaggcaagtaaagagccaaatcatgaatgaactccattcacaaatgctacaaaaagaataaaatacctaggaatatagctaacaaaggaagcaaaggacctttccaaggagaactacaaaccactgctcaaggatatcagagatgacataagcaaataaaaaaaccattccatgctcattgataagaagaatcaatattgtgaaaatggccatagtacccaaagtaatttatagattcaatgctatttccattaaactaccattgacattattcccagaattaggaaaaaactattttaaaatttgtatggaaacaaacaagagcccaaacagcccagacaatcctaagcaaaaagaacaaagctggaggcatcacactacccaacttcagacttttttataaggctacagtaaccaaatggcatgatactggtacaagaacagacacatagaccaatggaacagaatagagaactcagaggtagtaagattgacacctacaatcatctgatcttcaacaaatctgacaaaaacaagcaatggggaaaagattctctatttaataaaaggtgctgaaagaactggctagccatacacagaaaatgaaactggaccccttccttacatcatatacaaaaattaagttggattgaaaacttattgacatgccgggcacagtggctcacgcctgtaatcccagcacttcgggaggccgaggtgggcagatcacgaggtcaggagattaagaccatcctggctaacatggtgaaaccccgtctccactaaaaaagtagaaaaaaaattagccaggcgtggtggcaggcacccgtagtcccagctactcgggaggttgaggcaggagaatggtgtgaacccgagaggtggagcttgcagtgagcagagatcacgccactgcactccagcctgggcgacaaagtgagagtctgtc

SEQ ID NO: 104 - DNA, 4395 bp, Homo sapiens
atagaggatgtagtctgagagaaggatattccggctggaagaaagcaaaaaccatatgtgtgctgctttggggccatgtggcaaggaactgtggatgaactctagctgctgagagcagctcctgaccaatagcccgcaaggaacgggcacgtcacaatcacatactggaaggaggctgaattctgcagtgaggcacagataactggaagaagaacccagctccagatgagaatgcagcccggtcaacacttgatttcagcctgtgagaaactgatcagaaaactgagccctgcttggacttccaccctacaaaactatatgactgtcttgagcacatacgtgcttgcttgctgtggactttggagagagctggcttctcttgggcatgcttcatattctgctttgatggcccttcctctcaaaagcttgtcccgttgtgactttctccatgagcttagcagcatctctggagggctcctcagcactgcctcttgttgcatcaagagcaaaatttgggaacaaatggaaaagtctgtggatccatagtttctgctataacaaacaaagcttttatgtttatattgcacttccacgtcagaagaacctgtggaagaatccaggaaaatgcctagtgtcaatgtgaggaaagtacatggatggcagcagactaccaggacatgaaaagaatagctcctccctgacttactctctcttggatcaattactgtgatggaaaccagctgccatgtcaggagtacactcagctggcctaatgggaggcccacacagagaggcactgaggtcgccaatcaataaccaacaccaatacagcgcagaccataagccagtgtcccaactagggacttgaagatgagtctacagagatgaccagagcggtgctgggtgaacttcattttcctttcctagtcaagaaggcttaagtaatagtatgaggaaatacctgaagacccaaaccctggtagaaaagacactgctgtcatggcaacattctaaggtctctgtgtcatccaggctggagtccactggtgtgatctcagctcactgcaacctctacctccgcgttcaagcaatcctcctgccttagccactcaagtacctgggattacagctttagcacattgaatatgtcatactactctctcctggactgcagagttttttgctgacaaatctgctgacagccatgttggaactctcttgattgtggtgaagcctaagaaacactgtctaagctaaaggaccaaggtcaacatcaacagcgaaagaggagactttgggacttggaagtgactcctaaaatagagtatttttaaactatggaacataacctcaataacattattgagaatggctacttggcaaataagggaacttttgcatcagagattatttatgatacatcacaatagcaatcttaaaaatggaagcagattctgagagacctaaagcacaaataaatgataaaggattgcaagtgtaaatattaggtttctctaggatgaagaaatctccttaaaaaaaggcctacgtttcaaagcctagctgtgcaggatgaatgaaaatccatttgcccaataaactagaaaatctagaagaaatggataaattccttgacacatacaccctcccaagactaaaccaggaagaagttgaatctctgaatagaccaataacaggctctgaaattgtggcaataatcaatagcttaccaaccaaaaaaagcccaggaccagatggattcatagccgaattctaccagaggtacaaggaggagctggtaccattccttctgaaactattccgatcaatagaaaaagaggaatcctccctaactcattttatgaggctagcatcatcctgataccaaagcctggcagagacacaacaaaaaaagagaattttagaccaatatccttgatgaacattgatgcaaaaatcctcagtaaaatactggcaaaccgaatccagcagcacatcaaaaagcttatccaccatgatcaagtggccttcatccctgggatgcaagcctggttcaacatacacaaatcaataaatgtaatccagcatataaacagaaccaaagacaaaaaccacatgattatctcaatagatgcagaaaaggcctttgacaaaattcaacaaccttcatgctaaaaactctcaataaattaggtattgatgggacgtatctcaaaataataagagctatctatgacaaacccacagccaatatcatactgaatgggcaaaaactggaagcattccctttgaaaactggcacaagactagggatgccctctctcaccactcctattcaacatagtgttggaagttctggccagggcaatcaagcaggagaaggaaataaagggtattcaattaggaaaagaggaagccaaattgtccctgtttgcagaagacatgattgtatatctagaaaaccccatcatctcagcccaaaatctccttaagctgatgagcaacttcagcaaagtctcaggatacaaaatcaatgtacaaaaatcacaagcattcttatacaccaataacacacaaacagagagccaaatcatgagtgaactcccatcacaattgcttcaaagagaataaaatacctaggaatccaacttacaagggatgtgaaggacctcttcaaggagaactacaaaccactgctcaatgaaataaaagaggatacaaacaaatggaagaacattccatgctcatgggtaggaagaatcaatatcatgaaaatggccatactgcccaaggtaatttatagattcaatgccatccccatgaagctaccaatgactttcttcacaggattggaaaaaaactactttaaagttcatatggaaccaaaaaagagcctgcatcgccaagtcaatcctaagccaaaagaacaaagctggaggcatcacgctacctgacttcaaactatactacaagtctacagtaaccaaaacagcatggtattggtaccaaaacagagatatagaacagaacaatggaacagaacagagctctcagaaatactgccacatatctataaccatctgatctttgacaaacctgagaaaagcaagcaatggggaaaggattccctatttaataaatggtgctgggaaaactggctggtcatatgtagaaagctgaaactggaaaccttccttacaccttatacaaaaattaatggaagatggattaaagacttatatgttagacctaaaatcataaaaaccctagaagaaaacctaggcaataccattcaggacataggcatgggcaaggacttcatatctaaaacaccaaaagcaatggcaacaaaagacaaaattgagaaatgggatctaattaaactaaagagcttctgcacagcaaaagaaactaccatcagaagtgaacaggcaacctacaaaatgggagaaaatttttgcaacctactcctctcacaaagggccaatatccagaatctacagtgaactcaaacaaatttacaagaaaaaaaacaaacaaccccatcaaaagtgggcaaaggatatgaacagacacttctcaaaagaagacatttatgtagccaaaaaacacatgaaaaaatgctcatcatcactggccatcagagaaatgcaaatcaaaaccacaatgagataccacctcacaccagttacaatggcaatcattaaaagtcaggaaacaagaggtgctggaggggatgtggagaaataggaacacttttacactgttggtgggactgtgaactagttcaaccattgtggaagtcagtgtggagattccctcagggatctagaactagaaataccatttgacccagccatcccattactgggtatacccaaaggattataaatcatgctgctataaagacacatgcacatgtatgtttattgaggcactattcacaatagcaaagacttggaaccaacccaaatgtccaacaatgatagactggattaagaaaatgtggcacatatacaccatggaatactatgcagccataaaaaatgaagagttcatgtcctttgtagggatgtggatgaaactggaaaccatcattctcagcaaactatcgcaaggacaaaaaaccaaacactgcatgttctcactcataggtgggaattgaacaatgagaacacatggacacaggaaggggaacatccacactctggggactgttgtgggggtgggggaggggggagggatagcattaggagatatacctaacgctaaatgacgagttaatgggtgcagcacaccaacatggcacatgtatacatatgtaacaaacatgcacattgtgcacatgtaccctaaaaacttaaatatgaataataataaaattaaaaaattttt

SEQ ID NO: 105 - DNA, 6284 bp, Homo sapiens
tagtttttttttttttttttttttttagttaattccctgggattttctatatacaatattatgtcatgtatgaatagttttactttttccttttcaatatggatgccttttgtatctttttgtttgtttgtttgtttttgagatggagtctcactcttgttgccaggctggagtgcaatggcatgatctcagctcactgcaacctccgcgtctcccaggttcaggcgattctcctgccttagcctcccgagtagctgggattacaggcgcccaccaccatgtccggctaatttttttgtatttttggtagagacggggttttgccatgttggtcaggctgctctcaaattcctgacctcagatgatctgtccaccttgacctcccaaagtgctgggattacgggcatgagccaccacgcctggctgcctttcatatctttttattgcctaattgccctggctagaacctccaattcattgttgaatagaagcctcaaagaggacatccttgccttgttcctgatcctagggggaaagcatttagtctttaaatatgatggtagctttgggtttttcatagatgtcctttatcaggttgaggaagtttccttctcttcttagtttattgactgtttttatcacaaaatggtgttggagtttgtcaaatactttatctgcatctattaagatgatcatgcaattttaatttgttattgatagaatagaatgtattacattaatagatttttgtatgctaaaccagccttgcattcctgggagaagtttcacttggtcatggtgtataatgctttgtatatattgctgaatttggttttgtagtattttgctgaggattttcatgtctatatttagaagagatattggtctgtaattttctttttttgtggtgtccttctctagttttgtcattagtgtaatactgactttattttatacataaattcataaattgcatatatttatggtgtacagtatgatgttttgaaatatattgacttcattaaaatgaggtcaatattactaatcccaaaactagaaaaggatatcacaagaaaagaaaattgggaaatattcctgttcttctgctttttggaagagcttgtgaagaatttgtattaattttttgttacatgtctggtagaattcattggtgaagaattcattgcacttgggcctcagctttccttcatgggaaagtttttgattactgatggaatctctacttgtgatagctctatgaaagtttctgtttcttcttgagtcagttttggtagcttgtgtctttctaggaatttgtccatcttgtctaagttatctaatatattggtgtacagttgttcattgtgtattttgtaatctttttttatttctgcaaggtcggtagaaatgaaccctctttcatgttttatctagtaatttcagtcttctattcttcttggctagtctaagataaaggtttgtctatttgttgatcttttaaagaaccagcttttggtatcattgattttctctattactttcctattctttattttattaatttttactctgttctctactatttccttccttctgtttgctttagattttgtttgctattccccccaggggttaagggtggaatgttaggttatcaattgaagatcttctgtcttttgtttagatatttatttatttattgagacagggtctcactctgtcgcccaggctggaatgcagtggcgcagtcttggctcaatacaacctcaacctcttgcactcatgtgatcctcccaccccagcctcctgagtagctgggactacaggcgtgcaccatcatgcctggctaatttttgtattttttggtagagacagggcttcaccatgttgcccaaactggtttcgaactcctgagctcaagcatccacctaccttgacctcccaaagtgctgggattacaggttggtgtaagccaccgcacccagtgtcgggatgttttttttttttttttttgagacagagtttcactcttgttgcccaggccggagtgtgatggcgcgatcttggctcaccgcaacctccgcctcccgggttcaagcaattctcctgcctcagcctcctgagtagctgggattacaggcatgtgccaccacacctggctaattttttatttttagtagagacagggtttctccatgttggttgttggtcaggctagtctcaaactctggacctcaggtgacccgcccgcctcggcctcccaaagtgctgggatgactgcctggccatgagatcttttgtcttttaaaaaaatgatttattgtttaaattgacaaagattgcatatatttatggtgtacaatattacatttgaaatatatgtatgttgtagaatggctaaatgaagctaattaatatgggtattacttcacatacatttgtcattcttaatataggcatttatagttataaattttcctctaagtgctgctttagctgcatcccatcagttttggtatgttgtgtctttattttcattcatctcagaatattttttattcttttgctttcttctttgaatcatttgttatttagaagtatgttacttaatttccacatatttgtgagtttcccaaactctttcctgttattgatttttaagttcattccattttggtcaaataatctattccgtatggattttattttttaaaatgtattattttatggcctagcatatgatctatcctagagaatgttccatgtgcatttgaggacaatgtatattgtgttgttgggtggagtgttccatagatgtctcttgattctagttagtttattgtgttgttttctatttcctagttgatctgctatctatgttgagagtgagttattaaagtcttcaactatgattgttgaattatctatttctcccttaatttctgtcagtctttgtgtcatgtatttagtgctctgttattaagtgcaaattggtgtatcttcctaatgagttaattgttttattattacaaaatgactctcaactaggtgtggtggctcacacttgtgattcctacattttgggaggctaaggtgggcagattgcttgagctcagggatttgaaactaacctgggcaacatggcaaaaccccataactaccaaaaaatattcaattattagctgggcatggtggcatttgcctgtagtcctagtgactccagagactgaggtgggaggattgcttgagcccaggaggcagcgattgcagtgagccaacattgtgccactgcactgcagcagagtgagagaccgtgtttcaaaataaaataaaatagggagggatagcattaggagatatacctaatgctaaatgacgagttaatgggtgcggcacaccagcatggcacatgtatacatatgtaactaacctgcacattgtgcacatgtaccctaaaacttaaagtataataataaaaaaataaaataaaataaaaattctcatttctagtaacttttttgttttaaagtctgttttatctcacattagtatagtcactccagctttcttgttgttactgttctcatgatattatctttttccattcttttactttcaatctatttatatctttgaatctaagtgagtttcctctagacagcctatactttggatcattttatttgtgaaagaagctttgttggatataggattattgttggatataggagtcttgactcacagttgttggtttttttttctttgagcactttgaatacattatcccactgttttcttacctctatggtttctgagaagccaactattaatcttattggggttcccttataaataatgtcatttttatgttgctgctttcatgattttgtccttgtcttcaacttttagcattttttctctgatgtatctgttgtggctcttttcatatttaacctacttggaattcattgagcttcatatatatgtagatttttgcttttcaataaacttgagaagttttcagccattatttctttgaatatttctctgctcctttttctcctttggtactcccattatgtctgcatcagtgtaaatgatggtgtcccacatttctctgggctttccatttttcttcttttttctctttgttctttggcttacatagtctctatgaatctacaagtttgcttattctttcttctgacaattcaaatctaccattaagcctctgagtttttaaaaattatatttattataacttctaagtccaaaatttccatttgattcttttctataatttctttttctttattgatattctctagttgatgcaacattgtcgtacctttctttacttctcaatcatgttttcctttagttctgtgaatctgtggataatggctaatttgaagtctctttttttttgttataaatctgttctcacaggcagtttctgttgtctgcttttttcctagtgtatgggtcatgctgtttctttgcatgccttgtaattttttgttgcaatctggacataataggtaatatattgtagcaactttgtgtataggtactcccctccctccaggacttattgttatctgctcatttatttgtttagtgactggctgggttattttaatgaaatgtattcctgcatcctccctccagcgtaaagcctctgtgttgctcctcgggagatgcagcatcctatagtcaccatggggtaacactggttttggtaaggttctcttcctcttcttccttgaccactcccaggaattaaacttcactaattcttgctgattgctctattgttttcaacagttatctggtttataaatagctctacactgtaattcaatcaaattctggctcttttgaaggaatagtttctgacgttagtgtttgatatttgttctaatccccagagggctcctctaagctgttttattccatggttttcctggaaactaggcagccttcagtttgtcctgcattccaaatcccagttggactgtcctcccagttgacttctgtcacaatctccaatgttcttgagagcacccttagggttgaatgtctccactatctgttggagatgaagtcagctcctttgtgaaaggattaagagtttcctgttttacagcttgcttctcacatcaggcaaaatctctaagccaaagctctggagttgcaagtgggaaaaatggcaaacttctcttttagtgagctgtagaagctaagtgcttgatagaggattgagagcagcagactgaggtcctcttgtcttgcctctcctggtaaggcatggaaccatcacctttccagattgagcaagggtgctaaggggcccagtattctcaatgtgatgagttcaaggtagagcctctgtcccaatggaagaggagagcccctgcctctcaactgcactagcccagtgcttagcttcaacaataggtagctgaggacaggatgagaaacagtgatgtcttgctctttacaggaagggggccctccaagtggaagttgaggaagggggataagttggagagggagcctgtgttcttgattatagcagtctggagtgaagtctgtcttgctgagctgggaagggggtgggagcaagtggtcttggtttatataccacagatgctttcctttcttacagaattttcagatttcctttgatatatgtttcttcatttgctgttggcccttaggactgtctccataggctttaagtgatttttaaaaatattttttatcagtttcatatgagagcaggccagtggagctcctcatactgtcaagccagaagtactattctttctttttggagacacagtcatgctctgttgcccaggctggagtgcagtggcacgatctcggctcactgcgacctccacctcccgggttcaagcatttctcctgtctcagcctcccgagtagctgggattacaggcgtgagccaccatgcccagccagaagtactattatttcttataactacatatgaatctaaaattatcacaaaaggaaacttcttttaagaaaaagaaaagaatcagaacataaatatacagcatggcaaaactacatctaaaacaagtattataggtctcatggtggaaaaattggacccacaagaaaagttgttaattatctctgatattctgaaccattgatatctgcaaaatgattactaggtatgtgcaatgaaggctattgatgttaccctgtatatctgcacactgtgtacaaatgctgttaaatgatgtaat

SEQ ID NO: 106 - DNA, 1136 bp, Homo sapiens
ttttttttttttttcaaggggcgggttgtagatcgcgcgcgcaccctggagagcccgctggttgtgtgaggccctggccctgtgggtagcagaacactctgtctcgctgtgagcaacaatacactaaaaaaaaaagaaaagaaaaaaaaaaaggtaaagcctaattcccctccccatgaggatgtgactcgcttctaacagaatatggcagaagtaaagatatgtgactttgagactatgtcatgaaggacattgtggcttctgcctatctttcttctggatcacaccccaggggagaaagccaacctccatgttgtgaggacactcaagcagcccttcgtggaggtccgcgtggtgaggaattgaggcctcctgctgatggctcatgctaacttgctagccgtgggagtcagctaccttggaagcaatccttcatccccagtcaagcactcagatgaccgcagctctggccaacatcttgactgcaacctgtgaacgaccctgagcagaactgtccagttaagccactcctggctcacaggaatgggggagataataaacatttatcgtttcaagctgttaagtttgggggtatgttatgcagcaagagataacaaatgtagaatatttcactcatttctacatgaagatttcttttctttttttttttttgagacagagtctctctctgtcacccaggctggagtgcagtggcgcgatctcagctcactgcaacctccacctcccgggttcatgccattctcctgcctcagcctcccaagtagctgggactacaggtgcccaccaccacgcctagctaatttttttgcatttttttagtagagacagggtttcaccatgttatccaggatggtctcgatctcctgacctcatgatgcgcccacctcggcctcccaaagtgctgggattacacgtgtgagccactgcgcccggccctacatgatgatttctatcacataaatatacaatactatatttatcaagcactatatgttaatagattcattatcaatcctatcccgttagaatgtaagctgcatgaaagaagaaagtttgttttgttcattgccatagacttacagtgttgataaataaataaatatttcttgaatgtg

SEQ ID NO: 107 - DNA, 2536 bp, Homo sapiens
agtactttttttttttttttttttttttttttaatatatctggcacttgacttggtttctctagcttttgcaacatctcctatggctgttttggtgatagcagtttgaaaaactaaattgctatatatctggaatttatgaatgcacataaatcattatatcattaaacaattgtctttgaaatcctttaaatcattaaactccccctctccatgatagcagaaacatgttaacaaatagagctctctataaataacacagcagggaagaaagctcccgctgggcacccatttcccccttcttacatagagactatttgttaccttcttggcaccggcaggtctggaactcctgctgctaaagactaatgtattttacattaacactcaaagtgatccccaatttcttctgctcaagggtggattgtttttaaaattcttttatctttacatgtaaattatttatagacttttttttttccatttctagtttggtgtggttggcaaatctctaccactaaaaacaagctcaccactccccccaccccaaaaaaatgaatgaattagcttctctgaagctttttcgttttgctgattttaagagaaaactttcagaaacctaataaaattgttttgcatttctaccttgtctaatatgaagactaacaactaactattgattgttatttcactccctgttttctatgatgatatatgatcacaattgtatttcaatttttaaaattacacatgctttgttttatttctcaaaaagtgctaatgagaatgagggaaacatttccaatctgtgatttgggcatggtttttcaaatgtgaaatgttctctttttctagcagcagttaaaaatgtaaacacaccgttagtttcaaaatgtttcattataaacattttgttgacatttgtcaataacaaataggcatttttcctaaaaaaaaaaaaaaaatctgaaaaatcaaagcaagttagatgcagttttatctaccaggtctcatttgtacaagatgtgtaaaacattaataatttctgtatttggtcattcttgttttttgttttgttttgttttttgttgttgttgttttcccatttgttttcattcatggttaaatcaaaagcttggcttcaaaatggttttttttcctgccatgttttttcgttgcagtaactaacccttgttcttccatcatgtttctgttcctgtagattcttgtttgttccagaagatggcagcacaacctctgaagtttttccttctctgtgcataacctaatggctgttgcctgtgtggccctctatttttactcatttttcttacataagtagtatgtatcaattgaaaaacacagaactgtacggaatttaaaagtggaaatatggcatctatcttccttgcattccacgcaggtgtcatccagccacaccctcctctctgcagctctctctgcaagcacttaacacctggcatgcaccttccagacctttcttgtataaacatgcatgcatcgttttgttgttttctaacaggatcactatatgtgccattctaccacttggtttttttaattcaacaaaatgccatgagtatcctttagtctttttatggacagccctagtgctgctacttcagtcttttttaaccccttcatataccttgaacatctgtaatgaaggtggtcatctccttactaatggatgaatgtcagttatctccagcttttgcaattatagcagtaaatgtagcaaatacaaagccatattgggcttgttgaaaatatctgtaagataaattccttgaaattaaaatgattacgttctcttctgtggatcttagctggcacattccccttacacacattttggcatccttgccttctttctgcctctcattttctgttcctactacttaatgccattttgcttccatcttctgtcactactgcctctacttccacttaagctgcagaattgagggtgggccttagacctggtatgtggaggagagaatgattaattatacctggttcatgctttagattgaaagagctacctttcaaagtcaagtttattgaggtataattaacctacggtgaagttcgcgtttttaaagcatccagaattttggcaaatttatacagccatgtaaccagtgccacaatcaagtaataggacatttctgtcaccccaaaattcctcccacctctttgtagtcaattttctacctgccaaccccgggtcttcacaactgctcatctgatttctagtgttacagttctgtcttctccagaatgtcatacaaatgagatcatataatatatacccctttgtgtctttagcttagcgtaatgcttttgagattcacccatgcttgcatgctgtaagtagttgatacttgtttattgctgatacttgtttattccattttatagatgtaccaaaacttgtttatcagtttaccacttgatggatatttcgattatttctggtttggggctaatgtgaataaagctgctgtaacaat

SEQ ID NO: 108 - DNA, 2525 bp, Homo sapiens
ttttttttttttttttttttttttttgaattgttacagcagctttattcacattagccccaaaccagaaataatcgaaatatccatcaagtggtaaactgataaacaagttttggtacatctataaaatggaataaacaagtatcagcaataaacaagtatcaactacttacagcatgcaagcatgggtgaatctcaaaagcattacgctaagctaaagacacaaaggggtatatattatatgatctcatttgtatgacattctggagaagacagaactgtaacactagaaatcagatgagcagttgtgaagacccggggttggcaggtagaaaattgactacaaagaggtgggaggaattttggggtgacagaaatgtcctattacttgattgtggcactggttacatggctgtataaatttgccaaaattctggatgctttaaaaacgcgaacttcaccgtaggttaattatacctcaataaacttgactttgaaaggtagctctttcaatctaaagcatgaaccaggtataattaatcattctctcctccacataccaggtctaaggcccaccctcaattctgcagcttaagtggaagtagaggcagtagtgacagaagatggaagcaaaatggcattaagtagtaggaacagaaaatgagaggcagaaagaaggcaaggatgccaaaatgtgtgtaaggggaatgtgccagctaagatccacagaagagaacgtaatcattttaatttcaaggaatttatcttacagatattttcaacaagcccaatatggctttgtatttgctacatttactgctataattgcaaaagctggagataactgacattcatccattagtaaggagatcaccaccttcattacagatgttcaaggtatatgaaggggttaaaaaagactgaagtagcagcactagggctgtccataaaaagactaaaggatactcatggcattttgttgaattaaaaaaaccaagtggtagaatggcacatatagtgatcctgttagaaaacaacaaaacgatgcatgcatgtttatacaagaaaggtctggaaggtgcatgccaggtgttaagtgcttgcagagagagctgcagagaggagggtgtggctggatgacacctgcgtggaatgcaaggaagatagatgccatatttccacttttaaattccgtacagttctgtgtttttcaattgatacatactacttatgtaagaaaaatgagtaaaaatagagggccacacaggcaacagccattaggttatgcacagagaaggaaaaacttcagaggttgtgctgccatcttctggaacaaacaagaatctacaggaacagaaacatgatggaagaacaagggttagttactgcaacgaaaaaacatggcaggaaaaaaaaccattttgaagccaagcttttgatttaaccatgaatgaaaacaaatgggaaaacaacaacaacaaaaaacaaaacaaaacaaaaaacaagaatgaccaaatacagaaattattaatgttttacacatcttgtacaaatgagacctggtagataaaactgcatctaacttgctttgatttttcagatttttttttttttttaggaaaaatgcctatttgttattgacaaatgtcaacaaaatgtttataatgaaacattttgaaactaacggttgtttacatttttaactgctgctagaaaaagagaacatttcacatttgaaaaaccatgcccaaatcacagattggaaatgtttccctcattctcattagcactttttgagaaataaaacaaagcatgtgtaattttaaaaattgaaatacaattgtgatcatatatcatcatagaaaacagggagtgaaataacaatcaatagttagttgttagtcttcatattagacaaggtagaaatgcaaaacaattttattaggtttctgaaagttttctcttaaaatcagcaaaacgaaaaagcttcagagaagctaattcattcatttttttggggtggggggagtggtgagcttgtttttagtggtagagatttgccaaccacaccaaactagaaatggaaaaaaaaaagtctataaataatttacatgtaaagataaaagaattttaaaaacaatccacccttgagcagaagaaattggggatcactttgagtgttaatgtaaaatacattagtctttagcagcaggagttccagacctgccggtgccaagaaggtaacaaatagtctctatgtaagaagggggaaatgggtgcccagcgggagctttcttccctgctgtgttatttatagagagctctatttgttaacatgtttctgctatcatggagagggggagtttaatgatttaaaggatttcaaagacaattgtttaatgatataatgatttatgtgcattcataaattccagatatatagcaatttagtttttcaaactgctatcaccaaaacagccataggagatgttgcaaaagctagagaaaccaagtcaagtgccagat

SEQ ID NO: 109 - DNA, 3776 bp, Homo sapiens
attataggcttgagccactgcatctggcccaaacccacatttctaaggctctgtttcatcctgtcgccagcaggagggtggcagaggtgctcccattcctggatttccattgctggggctttcctcccatctccctgggcccagattgaaggggtcgtttatcaaatcagaccttgcgtttgctgtcccttggagtagaagttgctgtccactctccattcttcccatcttccttgagtagtagaaaatttaagttttagctggaaacacagcctcctagctaaaaacacttggcagcatttgcagtatgtggtggcacacacccgtagtcccagctactcgggaggctgaggcaggagaatcgctcgtacctgggaagtggaggttgcagtgagccgagattgtgccactgcacttccatctgggtgacggagcaagactccgtctcaaaaaaacaaaacaaaacaaaaaaacacttggcagcctaacttgcggataggcatggccacgtgactaagtgctaccagcagaagtgtgcagcactggctggaatgcgggtatgatggtgagaactgaagtagccgcctgtggtcacaagacggtaatcatgtgttgtggatgtcagaggaaccagatggaaggagcctgggtctctggcagtgtggagccaccattttggccctggactgcttatgtttaagacccttaaatgaaagagaaataaacttctggccaggcacagtagctcatagatctcatgcccattttcaaggccttatatccagctccacaaaccaagccacacagggctgggcacagtgactcacatttgtaatcccagggctttgggaggctgaggcaggaggattgtttgagtccaggagtttgagaccaacctgggcagcacagggagaccccatgtctacaaaaaatttttaaaaatgtatctgggtattggtggcatgtgcctgtagtcttagttactcaggaggctgaagtgggaggatggcttgagcccaggaggttgaggctgcagtgagacttgcactactgcactttagcctgggcaacagagcaggaccttgcctctaaaaacacacatgtacacacacaaaactgaaataagcttatatcttgtttaagccacagttactttagccatttttcttttcttttttaacggtagctgacctgaacaaatatatcagccaaggagtgggaaagaaggttataccttttttagggtatataggttatacctctggggagaggcatggacatcttcctgggttctgcaatgagtgtagcttaggttaatctagccataaagcggccttgctctggtaccttgcagggtacctctgacctatgagaaccaacatctctctagagtctgagtttttgttgcacctgagaccaccaagtccatctccttgacattgattcttatggggataattatcaataagtatattagcttcctgagactgctaaaacaaattactacaaccttggtggattaaaacaacagaaatgtattccctcacagttctggaggccagaagtctgaaatgaaggttttggcagagctggttccttctggaggttctcaggggaaaatccgctccatgcccctggtggcttctagcttctggtggctctggcagttcttggcattcctgggtttatagacatgtcactccagtcgccacctctagcttcaatttgtgtggctttcctgtgtcgctgtgtgtcttctcctttgtgtgtctctctctctctgttttttttttttttttttttttttggtgacagagtcttgctctgttgcccagactggagtgcagtggcgcaatcttggctcaccgcaacctccacctctcaggttcaagcgactctcatgtctcagcctcctgagtagctgggattacaggcgcatgccaccgtgcctggctaatttctgtattttactagagatggactttcaccatgttgcccaggttgtctcaaactcctgacctcaggtgatctgccctccttggcctcccaaagtttgtttttgtttttgagatgggatctcactttgtcactcaggctggagtggagtgatacaatcatagcttactgcagctgcaaactcctgggctcaagcaatcctcccacttcagcctcctgagtagctggcactacaggcccatgccatcacacctggctaatctttttatttttgtagacagagggtctcactatgttgcccaggctggatttgaactcctaaccccaagcaatcctcttgcctcagtctctcaaagtactgggattataggtgtgagccatggtgcccagccatttctgtctcttataaagacacctctcattggatttggggcccatcctagtccagcatgatctcatctcaagatcctcaccttaattacatcttcaaagacctttctttcaaataaagttacattctgaggttccaggtgaacaaacctcacccactacagtgagagacacttgtgagccctttaactgggagttctgctcccataagtttagcatccactccaatcactgccaccccaccagggaacggctgttttctccagaagatcttggactctgtggtaagcacaattctgagatgacccccagtgaactctaatgaccccatatctttgcataatcttctgatgaatgtgggtggggcccataacttgcttccaaccagtagaatatggcaaaggtgatggatgctactcttggactatgatacatggcagagaggaagggatttatttttttttgagatggagtcttgctctgctgcccaggctggaatgtggtggtgtgatctcggctcactgcaagctccacctcctgggttcatgccattctcctgcctcagcctcctgagtggctgggactgcaggcgcccaccaccacgcccagcaaatttttttggatttttagtagagacggggtttcaccatgttagccaggatggtctcgatctcccgacctcgtgatccacctgccttggcctcccaaagtgctgggattactggcgtgagccaccaagcctggccgaggaagggattttgaagatgtaattacagtccctaatcagttgattttaagcaaataaagtgggagattatgctgggtgggcctgacttaataaggtgagttctttatttaaaagagggtctagagctcagaaatagtcagagatatactcctactggcctagaggaagctagccactgagaattctacaactgtaagaaaatgaattctggccaggtgcaatgacccacgcctgtaatcccagaactttgggaggccaaggtgggctgatacttgaggccaggagtttgagaccagcctaggcaacatgattaaactccatgtctactaaaaacacaaaacaaacaaacaaacaaacaaaactagctgggtgtggtagcaggtgcctgtaatcccagctactcgggaggctgaggtaggagaatcgcatgaacttgggaggtggaggttgcagtgagctgagatcatgccactgcactctagcctgggtgactgtctcaaaaaaaaaaaaaaaaaggatgctgccaacaaccacaggagctaggaggacactgagcctccggtgagaccatagccctagccgacatcttgattgcagcctggggaccctgagcagaagacccagctaacccgtacctgaactccagacacatgggaacggtgagaaaataaatatgttattc

SEQ ID NO: 110 - DNA, 2530 bp, Homo sapiens
agggtttcctttatctttgatttctcagtggatttcttggcttcatcatttgaacttcattcaatttcaaactgtaagttatgccttttaccaaatttgagaagtttttagtcattatttcttcaagtattgttttagttccatctggtttctcctctctttcagggactttgatgatatgaattttacatctcttttaagtcccacaggcctagtatgctatgttctctttttgattttcaatctttttctctttattgttcagattgggtaatttttattgttctgtcttctagttcactgattttccagttttcttcaaatttgctgttaagtctattcatgagtttttttttaaaatgtagcttattgtgttttaaattcctaaaattttcatttggattatctttatattatatctcctacttctttgctgataatccttttttcacttatttaaagtgtgtttttacttgctcattggagtatttttgtgatggttgataattctaacatctctgccaccttggtattgacattcgctgattatccttttcattcagtttgagatcttggttctgggtaagaccaataatttccaatagaaatttggacattttgggtattatgttataagactctggatgtcattcaactttctgtttttgattgcttcctttgtcagtgctccagtggagggagaagaggcactgcctcattactgctgcatgaggatagaagcccaaatttcccacatggcctccgctgataccccaagggtagtgactccttgttacctctggtcaggggtggcaatttgttccccactgagcctccactgaaaacttcctggctgagagaggtatgaataccttgttacagctccccgcatgacctctgccaacagcaccttagtgtggacagggagcagaagtgtaggctcctcatgtggtctctcctaacatcacagggagggaagggcccttgttactacctggtggaggtgaaaactctggactcaactttccctaacaccagccccgcagcaatgctagagtctgcaagggtgcaagtctaggcttccctctcagcttttcgtgacatggatgagagtagactcatagttttattcacgatgttcggctggagtagagtggttattgtgtgaaagcattctatcttgctaggctgcctctttcccgttctttggcttaagagagcagggttttgttggggcgttttctgtctgtgcctattgacatttccaagttgctgccaaagagaaactcaggaaacccgccaccatgttattctttgggttccaaagtccctagtcagtctacttttttcccctcctttccaagtcttacacttgttatatatatataacgtccagagattttagttgtatatagagataggaaaaggaaaaaaatccatccactgcatctccctggaagtgaaagtctctgcaaatgtttttttttaattaaaaaaaatttaattttctcatatttctcttgatgaagcaactccttcaaaagcatgccaactttgtagacttcttagaaataataatgtattaaacttgcttcaacaaatataatgatagattatttaatgtgtataaagattctttaataaacaaaaaaaatcccataatactcacccaaatcctacagaggtgcttgtaaacaataactatgaaaataagaatttcctttcctaatagattccagtacttgacagaggcaaatttctggagcatatctctgccttaattagctgttgctataataatgctacataaaaaccattccaaaactcagagacttaaaacttattctcatgcttgtgggtcttcaggtggctgcaagttggctgggctgagctggacttcagatttcaggttctagcctgctgtctgggttcctgtcaggagacatgtgtttctcatcttctcaaaccagcagctcctggtgcatgtgaatggcttcatgtgtctcattctaaagttcaggctgaaaggttagacactatctgaggcacattttttccatgatagattatcaggccactgatccccgcaagacattcaaggcctctgcttgtaccttgcttactaacattgtgctgcaatcacatggccaagtccaatagcaatgagacagggtactgtacccagcacaaggtggaaaaagagaggagtcactatttgctaatacaaacgctagtacagactgtcacaatttcttttactaaccttgttccaatgaggaaggggagaaaaagctagttcacatgccacttggaactttacaagtatactagggcccttttgattttactcagctatttagcatcctggagccagtttccttgtcttagatccaaaattaatcagttactaatgactccctgaccttttcctcatgcctgctttcaaagtgacctctccaagtttggccttctccagctgctgttgttccttcaaagagctattttctcatactttcgtatacaccgaaat

SEQ ID NO: 111 - DNA, 1808 bp, Homo sapiens
agggtttcctttatctttgattctcagtggatttcttggctcatcattgaacttcattcaatttcaaacttgctccagtggagggagaagaggcactgcctcattactgctgcatgaggatagaagcccaaatttcccacatggcctccgctgataccccaagggtagtgactccttgttacctctggtcaggggtggcaatttgttccccactgagcctccactgaaaacttcctggctgagagagcaagtgaatcagacaagaggccaaaagaaagatgactttaaaacatcatgggctgtgtatagcaaagacaatcctaagcagaaagaataaagctggaggcatcacgctacctgacttcaaactatactacagggctacagtaaccaaaacagcatggcactgtttcaaaaacagacacatagaccaatggaacagaatacagaactcagaaataaggccacacatctacaagcatctgatctttgacaaatctgacaaaaataagcaattgggaaaggattccctattcaataaatggtgctggaagagctgcctagccatatgcagaaaattgaaatggaaccccttccttacgtgttatataaaaattaactcaagatggtttaaagacttaagtgtaaatcccaaaagtacaaaaaccctagaagaaaatctgggcaataccattcaggaaataggaatgggtaaaaatttcatgatgaaaatgtcaaaagcaaatgcaacaaaagcaaatattgacaaatgggatataattaaactgaagagcttctgcacagcaaaagaaactatcatcagagcaaacagacaacctgcagaatgggagaaaatttttgcaatctatccatctgatgaaagtctaatgtccagaatctacaaggaacttaaacaaatttacaagaaaaaaaacaaacagccccattaaaaagtgagcaaagacataaacagtcacttctcaaaagaagacatttatgcagccaaggagcatatgaagaagagctccacatcactgatcattagagaaatgcaaatcaaaaccacagtgagataccaaatcacaccagccagaaaaaaatcaagaaacaacagatgctggcaaagctgtggaaaaataggaatgcttttgcactgttgggaggaaggtaaattagttcaaccattgtggaagacagtgtggtgattcctcaaagacctagaaccagaaatatcatttgacccagcaaatccattattaaatatatacctaaaggaatataaatcattttgttataaagatacatgcatacatatgttcactgcagcactattcacagtagcaaagacatggaatcaacccaaatgtccattaatgatagacttcataaagaaaatgtggtacatatacaccacggaatactatgcagcaataaaaaggaatgagatcatgtcctttgcagggacatggatggagctggaagccattatcctcagcaaactaatgcaggaacagaaaaccaaacactgcatgttctcacttataagtggaagctgaacaatgagaacacatggacacagagagaggcacaacatacaccctatggactgtttgggggtgtgtggtgggggaaaggagagcatcaggaaaaatagctaatgcatgctgggattaatacttaggtgattggttgatagatgcagtaagtcaccatggcacacgtttacctatgtaacaaacctgcacatcctgcacacgtaccccacaatgtaaatgaattaaaaagcaacaataacaacagaatcgggc

SEQ ID NO: 112 - DNA, 4217 bp, Homo sapiens
gggtttcctttatctttgatttctcagtggatttcttggcttcatcatttgaacttcattcaatttcaaacttgctccagtggagggagaagaggcactgcctcattactgctgcatgaggatagaagcccaaatttcccacatggcctccgctgataccccaagggtagtgactccttgttacctctggtcaggggtggcaatttgttccccactgagcctccactgaaaacttcctggctgagagagggagctcaccaagttcataggttagggagaacttaaatgaaataaagaactaaaagtggcgaaaataaggcagcaacaaatcataataaaaataccagttgaaaagaaaagtggaatcaaggatctcataatagtgttcatttctctgttggaaatagtccatttggaagaacctgtgatccgcttttacagacaacttcatggtaggatttccagctttaacggattatcttgggaccaatgaccccagacaaacgaaggatgattaatctacaaagatgatttcacaacagattacaaagcctccttcaagcctcctcccagatcaaaatggagaaaacagttgatcagcctcagaatatcaggggaacttaaggtctctttagagccaaagtactaataaatcactaaatagtttcattttctcactttcttcagaaaattcccatcatattttttaccaagtgcgcatgcacacacacacactcatatctacgtcagtgaaagaggatctgatactaaaaaaacagcagaaatcttttcactttcatgagaaaggtttttctgaatcatctacacagcatcatttaatgctttccctaccctatacatgatgacttcttgtaatccccctactatgctatgagttccccataggtgggaatggagtaataacaagccttgaagctcagcgtctagcacagggacccatacacagtaaacggtcagttaaatgttttgttcttaactgcactttaactaagctgtactttagtacacggcgcagatgtgcatttcttatgaagaagcatgaaatcttttgctttctgtgttgctaggatcgacctcacttacacaaacttagttaatagaactcataagcagctaatgattttcatcaggtattaaaaaattctcagttgccacttgactatatacaatgaaagtgacaggctgaaggcagaagactatgccaggatgttacaggaaaatgtcaaggccatgtgaaaaaagaggggcagtcagagggaagggaaggaaggaagagggaggagctgccacttgagaggttgtatcatggtcctcagctgtctgtcactgagaagagtttgcaactcacagggtttacgtggtttcggttggtgcatgatgctggccttctggtgaagtattttttttatggaactgatcaaattcccctctttcacatctgctcctatatgtccgggttaacttcacagtggtcatcatcttccctttgcttccattttctagggggtttttaggtatccgaggaaactacttttgttctgttttaaacaaaatttatttttcatttaaaatggtacagaaatggcagaggtaggaaataaactgaaaccttcttacaactttgcatgggaaccggggatgacaggaggcccctgtgaggtgcatggtacctgctcaagtaaggaagaggggagccagcttctccccacagcaggggagtgtcaggtgccatccgtcagtgctctggctacaggacacttgccatggaagctgaacacacattagaattctcaggcagaactgtgtggtttaaaggatctagacagctgggaacgaatattttctgtttctgcctaatgtaaagaacacattatggcattttgaagttcccttgagtcctgatggtctggcattttaatcactacttccttaattcaaactcctgccatctctagcctatgttaggccttggactccaaactagtttttcttcacagttctgagaatctacagtctcttcacatcatcctccactacctcactgactaatgccccaggtacaccgaactacattgagttctgcttgatcaacctgtcctcagggcctgtatatatgctgttcttgcttgaaatactgtccccactccttcccttcccattctggtatacctcccttcacctagatatgaactcatcactaagtttttgcttctccaggaaactgtccctcaaacaccctcaccctcgtgcctgggtctgatgctcctctgaggtacttcttcagtaccataaactgacctcagcacagccctatgttcctgcattccaattgtctgcttaccagacaatagcctcatatgacagctaagtgtaggtctcactattcaatacatcccaagtccaggaaggtctcaatagctagccatgaatgaataaatgaagggagaaacaggtgactgtaccaaggttcaagaatgtgtttgctatgattgcctttaacagtcttcatgctcatgggtcagaatttgtatcgttcctaaagacagtattttgttactctatatattttttaaatgggggctaatgagaaaattctttaatttgattgaaataatgtgaaaggagtttataggccattttataagataagagcaagatgagttcaatgtgctctctgaatagagtaatgttgtatcccagttatgttagttttccttaaatgattcttagtgccatccccttttattctgtttcctgatttggaccacacattaaatggtcattccatctctaaataccttgggaatcatggagagaagaggaatcacagacatacaaagaacacttgaaggattttctgcaagtttgaaagtagaactgaagaatatagccaatacacgttccaattctactttctcaacaacacaatttaaatttactcagagctttgcacaatcatgattaatgataaaagggagagaagtggttttgctagagtttcttaagaaactactctcactctctctcagttacccaaagataaacacttgcaaattctttttatttggggaagtaagattattatcaattaacatctaaagactaatgtttcccagagtgtcttataaaagcctggttagtgagtgttgttatttcagattgcgttttgtttctcatccttttttttgattacagttgactgttaatttaaaaaatgaattgatatgacaatgaatgtatgataactaagtggtttatttgagaacatccttgttgatttatgtgaaaatacaatcctaagaataccaccttcctccccaggctgcttgagttcagtaaacagatttgcaggactcatttacatcaagaaccaactaacattttggaaaccagaaaggcttaatttctacagagtctgttaattctttgcaatgtgttcattgcttgcatcttaattgaaatgttttcaatagatgaactcatctgattttataacatttctaaaaagtaccatgaattggcttggtatatacccgaaagaaaggaaatctgtatatcgaagagatatcatcactctcatgtttattgcagcactattcacaatagccaagatttggaagcaaccaagggacctatcaacagataaatggattaaaaagtaaggtgcatatacacaatggagtactgttcagtcataaaaaagaatgaaatcctgtcatttgcaaaacataggtagaactggaagacattatgtcaagtgaaataagccaggcacagaaagacaaactctgcatattcttactcatttgtgggagctacaaattaaaacgattgaactcatggagatagagactagaaggatggttaccagaggctgggaagggtaatgggggttagggtagttgggaaagttaatggattaaaaaaatagttagatagaatgaataagaactactatttcatagcacaacaggctgactacagtcaacaataatttattatacatttttaaataactaaaagagtataattggaatatttgtaacacaaagaaatgataaatgtttgaagagaaggatactccatttaccctgatgtaattattatgccttgcatgcctgtatcaaaatatctcatgtgtcccataaatgtgcacacctactacggtaccataacaattaaagtttttaaaaagt

SEQ ID NO: 113 - DNA, 7854 bp, Homo sapiens
gtttaattagatccatttttcaattttgctttgttgccattgcttttggtgttttagaatgaagtcattgcccatgcctatgtcctgaatggtattgcctaggttttcttcttggaattcttatggtttttggtctaacgtttaagtctttaagccatcttgaattaatttttgtataagatgtaaggaagggatccagtttcagctttctacatatggctagccagttttcccagcaccatttattaaataggaaatcctttccccatttcttgtgtttgtcaggtttgtcaaagatcagatggttgtagatgtgtggtattatttctgagtgctctgttctgttccattggtctatatctctgttttggtaccagcaccattgctgttttggttactgtagccttgtagtatagtttgaagtcaggtagtgtgatgcctccagctttgttcttttggcttagggttgacttggcgatgcaggctctttttggttccatatgaactttaaagtagttttttccaattctgtgaagaaagtcattggtagcttgatggggatggcattgaatctgtaattaccttgggcagcatggccattttcacgatattgtttcttcctacccatgagcatggaatgttcttccatttgtttatgtcctcttttatttcattgagcagtggtttgtagttctccttgaagaggtccttcacatcccttataagttggattcctaggtatttattgctttgaagcaattgtgaatgggagttcactcatgatttggctctctgtctgttattggtgtataagaatgcttgtgaattttgcacattgatttgtatcctcagactttgttgaagttgcctatcggcttaaggagattttgagttgagacgatggggttttctaaatatagaatcatgtaatctgcaaacagggacaatttgacttcctcttttcctaattgaataccctttatttccttctcctgcctgatttccctagccagaacttccaacactatgttgaataggagtggtgagagagggcacccctgtcttgtgccagttttcaagagaatgcttccagttttgcccattcagtatgatattggctgtgggtttgtcataaatagctcttattattttgagatacatcccatcaatacctaatttattgagcgtttatagcatgaagggctgttgaattttttcacaagccttttctgcatctatggagataatcatatggtttttgtctttggttctgtttatatgctggattacgtttattgatttgtgtatgttgaaccagccttgcagtcccagggatggatgaagcccacttgatcatggtggataagctttttgatgtgctgctggattcggtttgccagtattttattgaggatttttgcatcgatgttcatcagggatattggtcaaaaattctcttttttgtgtgtgtctctgccaggctttggtatcaggatgatgctggcctcataaaatgagttagggaggattccctctttttctaatgattggaatagtttcagaaggaatggtaccagctcctccttttacctctggtagaatttggctgagcaccaagtggacctaatagacatctacagaacaatccaccccaaatcaacagtatatacagtcttctcagaaccacatctcacttattccaaaattgaccacatagttggaagtaaagcactcctcactcagcaaatgtaaaagaacagaaattataacaaactgtctctcagaccacagtgcgatcaaactagaactcaggattaagaaactcactcaaaaccgctcaactacatggaaactgaacaacctgctcctgaatgactactgggtacataacgaaatgaaggcagaaataaagatgttctttgaaaccaatgagaccaaagacacaacataccagaatctctgggacacattcaaagcaatgtttagagggaaatttatagcactaaatgcccacaagagaaagcaggaaagatctaaaattgacacgctaacatcacaattgaaagaactagagaagcaagagcaaacacattcaaaagctagcagaaggcaagaaataactaagatcagagcagactgaaggagatagagacacaaaaaatccttaaaaaaaatcaatgaatccaggagctggttttttgaaaagatcatcaaaattgatagaccgctagcaagactaataagaagaaaagagaagaatgaaatagatgcaataaaaaatgataaaggggatatcaccaccgatcccacagaaatacaaactaccatcagagaatactgtaaacacctctacacaaataaactagataatctagaagaaatggataaattcctggacacatacctgctcccaagactaaaccaggaagaagttgaatccctgagtagaccaaaaacagggtctgaaattgaggcaataattaatagcctaccaaccaaaaaaagtccaggaccagatggattcccagctatgaaaattaaatctgtgtgactttggcaggtcacttactccatcatagtttcttacattttcctgtcatttgtgactgtttaaatatcataaaatcattgtgagaagaaaatgagttaatgtttgtaagttgtttattacaatggttgtcacatagaaataataaactatttttcttattatgaaatacataaagacatagcatagtctcactttatctgctgagcacttgcttgttcatcttctatttttctgaactttttcttatttactgcactacagggtgtctttggtaaaggaccatatgtcctttcattttggtaggcatactttgcatatctttcgttgcttatatgttctggagaagacctgtaggcaatggagctctttaagagtaagataaaggcaaggatttctttaacctagattatatatggccataattttgaaaatattttccataggcttctcacctttagaacagaatatatgatattggcctactttaggtaagctagtatgtagagaatctatcagagtttcatgatacccttaatagctgaaatgtgtatatctagatattaatatcacaatgtctataaataactatattttataggaatcactgacctattttatagacaagctatatgccttttagcagacattttctcctttgatatgtgagttctcattgtttccttttattaatagatattaggtgattgattcatagaaggacaagttgaactaaaattacctcctttatttttcaccatttgtccttggtttcattttcaatataccataagtagaaagaaggaatacaaggtgagaaagaatttatgtggtgcttgtcttccagctcatccacagagcacatctaccgtagcattttttttcatgtcaacatagatagtcctctgtctatacccaaattaggaacaagacggaatcatgtactggtttattagttggatgatgaaagtcatatctggatttgtactctcgatctttagttgtgtaacaaggtcatttgtaaaatggggatttagtataatgcttcctacttcataggtgtgatataatgatttaatgaaataattactctaaagcacttatgcagcttcctgggccttctaataattgttaaaaaaaattcagccttgatcctaggaattggagcatcttaaaatcacaggtgattctgatgcaggtagttggggaaacattctttaagataatgggacaaattgctctttgccagtcacagaagccatatgtctatttttgtccacctggcttaataactttcagaataaatgagtactgtaaacttaatagaatataaattataattttgatttgacaagcacttggttggcatatatgtgtacgtatatccgaatgtatatgaatgaaacacactttgagaactgaagctgaggattttgttaagaaatgctgtactcttatttcccgaaaaccataggagatgactaataccaatgtcagtgaaagttgtgactcaaggtttattcaaggtttattcaagtcaaagagtagaagaatttcttaagaataattgtgtgctggcagacattttcaggcttaagacatttcattttctaatttacaaacatgaaatataagatttttattactagtgtggttagtcatgctgctccagatgctaattttcatttcctaaacaagttattaaagtgaaaaatcagttctccagattttcatttggtggctgtaatttcaatccattcagcactaactaaatgaaaaccactctgcctgtagcatacttgttcttttccttctgcctcatggttttaccctacaggttctctctaattgctgctccttttctagtttttacattttcttctttgctccttaaatattggtaaaaggagtttattcctatcaaaattaatgttaataatcatcagttaagtatatgcttactgctgaagaaagactaaaggagttttcaaatctgttctttctgtcccatgcacatgtaatcctctagtactctgattgtacaaaagcaatcatttggatattcagaatttagattcctttccagtatggtctttcttaattcttaattccaattctttgggatctgatagatgctgcttttcttcagttacattttcttctctccaggctttatatttatatctaggttagaactatttttttttaaataattctgtgtgcctgtgattggttgatatgtttccccacattgtttcatttcatggcatgtcaacactgttattattcatctgctcttaaaagccctgctcatgaaggactgtaaaaaattatttcatggtctttacaacaaatttatattctgtttcagtttttgttttactttgatttttgtgtctttgttaaaacataactaaaatcttaatgttgttcaattttgctttgttttatatttaagctcaatgcaaaagacatttgttaatttgatttaacaagcagtaaatattcgttgaatgtttaataaagtagctatagagaataattccacaaataacttctttgctgtcttatagcctattgtaggttgtatctgatctcatttttctgtgtcatattgacatgaatagctataaattcaggacattttctgagaagtagtaccttgcatgcagcacatttcaaaaagtcacttgagcatagatttaaactctagatcatatttgtttctttccactagttttcagcttcatgatttcttttttttaaagtatagattaatgtaatcatgaagtcaatttattatctaagaaaccttaatgccaacattttttcccttttgcaatgattgtgtaacacaaataatattagatataagattcacatttgataggtagtttttaaaaaaataagtaaagcgatataaaatactttccttggtttgtttgccatttccttatgtttggaagagcatggcaataaatactttgtatatctaccaccaccagacattgataggaatcagtaaccatagtaggaggagcatggtattgtagtctacagcagttaaaagcaaaggctattcagcttggtatggcttcctttttgtaatttattttaattcttaaccaaacttttatatagcacttgctaacttccatacattattctgaacacattttaaatattgcctatccttattacctctttaattataaggaaactgaggcatagaaaagttaagtggcttgtccaaggtaacagaagaagtgactgagctaaccaaatgttgtgttaggttggtaggattagaatcctaaccctgtcccttatgttgtgtgtctaaaagggcaaatttctacatctttctgaatttattttatatatatatatttatttattatatctattatatacaattatatataatatatatatatgtaatatgctttcatttccatctattcagcactcactaaatgaaaaccactctgcctataccatactcattctgttccttctgcctcatggttttaccctacagtttctgtctaattgctgctcctttttcagtttttatattttctcctttgcttcctaaatattggtaaagagagtttattcctatcaaaattatgttaataacagtcagttaaggaaatgcttgctgctgaagaaaggctaaaggatttttcaagtgtgctctccctgtcccatgcaaatatatatatataatggaaataatcataataaccttattacaatgttgctttgtaatgaaatatacttagatatacttagtcaagtgtcttcccagaacttagtgtcttaacgaatgttttttgattgggtttagtagctcacacctgtaatctctgtgctttgggagatcaaggcgggatgaccacttgaggccaggagtttgagaccatcctgggcaacatagccaagcctatctctacaaaaacaacgaaaattaaaaaaaaaaatcagatgtggtggtgcacagagaggctgtggtgggaggattactagagcccaggatttgcaggttgctgtgagctgttgattgcaccattgcattccggcatgattgacagtcagaccgtatgtccaaaatataaaaaaataaagaatatagcttagcattcatgtagcatggaggagagttaccactaccactgcattaattagattttgatgtaaggagctttctttttggttgacactctattgccttttttgttcccttttttgttttctgctagcctttgctaactcagtgcccttatatggcccttgtctcttcgaagcatacaactgaaatgcctcttttcctcttaaaacaccaggattttaaatttacccttatgcgaattcttctcaaattagagatcattttgccaatgagatgagtatttattaatcaagcaataaaataaagttatgaataggctaaatctgtttatgcatttatgcctttgaagaagaagaattcgaaataaaagaaacggtattgtgggagggatttgagcagaggatcttattagtaccaaattaaaaaaattaaagctattacattatttcaaaatgcactcctccaatcacagtatatccatcttagatatattttggccaatgtaaacttcttcatgaaagaatgaaaagagaatgtttataaaattgaatgttctggcatttaaaccttggatgtcacttattattccataaagggggacaattgcagttttttaacaaatcactttgagcaattcagttcaggatttttggacgtacttttgagtttatttaataatgttgttaaatttgaatataatgagtagaatagcctgaatcctgcaattgtgttttcagaactaagtaatcttaaatcacaattatgaatgctagtataaattaagaatgcatttttcaaaacagacaatacaattccaggtatccacagctagttgacgaaagcacataaaattatgtgtatttatgaatatgataatgaagtttgaaagtaatttaaaaaatgggcctggcgcggtggctcacgcctgtaatcccagcactttgggaggccgaggcgggcggatcacgaggtcaggagattgagaccatcctggctaacacagtgaagccctgttttactaaaaatacaaaaaaaaaagcaaattagctaggtgtggtggtgggtgcctatagtcccagctactcgggaggctgaacctgggaggcagaggctgcagtgagctgagattgcgccactgcctccagcctgagcgagagagcgagactctgtc

SEQ ID NO: 114 - DNA, 5931 bp, Homo sapiens
atgtataaatatttgtgttaacaccttaactgtggatttatcaattttgtcagggaatgacttatttaaactattctaatctttaattggttattaaactatgtatatatatatttttaaattttacttggagttctgggatacatgtgcagaacgtgcagggttgttccataggtatatgtgccatggtggtttgctgcacctatcaacacgtcatctaggttttaagccccacatgcattaggtatttgtcctaatgctcttcctccacttgactccagcccctgacaagccttggtgtgtgatattcccctccctgtgtccatttgttctcactgttcagctccgacttatgagtgagaacatgtggtgtttggttttatgttcctgtgttagtttgctgagaatgatggtttccagcttcatccatgtccctgtaaagacatgaactcattcttttttatggctgcatagcattccagggtgtatatatgccacattttctttatccagtctatcattgatggatatttggttggttccaagtcttgctattgtacatactgctgcaataaacatacgtgtgcatgtgtctttatagtagaatgatttataatcatttgggtatatacccagtaatgggactgctgggtcaaatggtatctctggttctagatccttaaggaatcgctacactgtcttccacaatggttgaactaatttactctcccaaaaacagtgtaaaaatgttcctatttctccacatcctttccagcatcttttgtttcctgactttttaatgatcgccattctaactggcatgagatggtatcttattgtggttttgatttgcatttcgctaatgaccagtgatattgaactttttttcatgtttgatggccacataaatgtcttcttttgagaattatctgttcatatccttcatcctctttttgatggggttgtttgtttatttcttataaatttgtttaagttctttgtagattctggatattagccctttgtcagatggatagattgcaaaagttttctcccattctgtaggttgcctgttcactctgatgatagtttcttttgctgtgcagaagcttttagtttaattagatccaatctgacagttttggcttttgttgccattggttttggtgtttcagtcatgaagtctttgcccatgcctgtgtcttgaatggtattgcctaggttttcttctaggatttttatagttttagattttatgtttaagtctttaatccatcttgagttaatttttgtataaggtgtaatagaaggggtccagtttcagttttctgcatatggctagtcagttatcccagcatcatttatttaatagggaatcctttccccattgcttgtttttgtcagatttgtcaaagatcagatggttgtagatgtgtggttttatttctgaggcctctgttgtgttccattggtctatatatctgttttggtagaagtaccatgctgttttggttactatagccttgtagtatagtttgaagtcaggtagaatgatgcctccagctttgttatttagctaatatgcctttttgtgaaatagaaattgggtctttaaaaatactttgtttaaataatggctattcttttcttaagcaagaacaacaatacatgtatctcatttatgttcctacttgacacagaacacaggataacagaaccccactttaattctagggaaaatggttaatatttgttctgaattttataaatatttaagttttattagttttatgttcattgttagtgtatttgagttaactgctacgaatgcattgtggaataaaatatgaaataataagatattaaaatataaatttgttttacattcttcttatgtcttaaatcagaaatataaatttgtaaaaatacattattttagacttttgataatagatttgtcagcctgagagtcttgtttatctcttcactatctaggattttttttttaactaataagataggatttggcataggaatagtttatttaaaagcttattaaagcctcagggtaaaacataattctttagcttattttgagctggaagttacatttgaaataatattcctagcttctctaattttgatatttcactgctttgaaccagtgtcaacgtgtggagtgttcttttgtctatacatgttcctatgtttattgccgatgctcatttggtgtttaagtgtatagcaagaaagtagcaggtaatacttatcttgctgggatgtctcggggaatatatatgagttcttaggttgattctagttgtctgtttcattgattgtaaattaaaaactggtgtagtctagtgagaaattatgaatttagtctacattgccttctcctgtcctgtgaaccctaactgttctgttctgtcctgtgtgggattgaatgactgtacactacaagggcttgctgattaaagtgtggcttatggagaagcagcatgagtttcacttggaaatgaattataaatgcagattctcaggacctacccccagaactgctgaatgcaaatgtacatttaacaagatctgtaggtgatttgtatgtatctttaagtttgagacacactgggctattactgaataggtcatttatgtcccaagacatgacacaaaattactgccacttacatatttgttgattgacctaccacagtcagaacatttgtactgtgttgaacgtgagctgtttggtcatagtatatggacagagatgaatgacagcatttctctgtgtcctttgtgttttcctatcatttctatcttattacttatttccaagctgacaaagtcacctttgaaattttctccaggtgaataagaaaaatgtagattttaaaaagatctgaggctgtttaatcttcaagaacactaaataaaaagattatgatgtttttaacttacatgattgcatcttagtaaatgcttagaaaaacatatttgatgaaaagttacacatttattagaacgtgatgctatcttaacacatttcaccttctgccttatatgacaatgatttacctcatgaagtaccattgagtttaattgtgtagtcttattggagcctaagccttaactgaagtcagtgcatgtttttttttgactaagatctgcacaagtaaacgcaatgtgatttgcattttatctcccagagtaaaaagtattgtatactctactttattagtggtattacctttatgaagtatctcaaaatgtattgaaccaatgagatttgttttccttgaattgtttaaattattgaacatacgtatttagtttctcctgctataggaatgaaataatgttattataactaatgaatatttttaatttattttcttttaaattattcttttcatggagtttgtaatttgttagttttgcttaagagaaaagtatttttattttttaaaaaacagtagtacagaaacattgaccctcctctatcatgagtttctacccttaagtttccattttaaactctttttcttctgatacttacttcgtatttccaaataatatgcataaacttacctgtcctcaccaattacattcacaataaaattaaataagatttttaactgaaccttgacaatttgggatactctcttaatctctgcttagcagagatcccgaatgtttccacaaaggaaaaattaatcacacataaaatcaaggatcaaaatgtcatatgaccttttaatagctagaagggaagctggagtgaaatagtaactctgatgccgttctgagatgtcatgacagtgtggctcatgtgggtttccttttgttgttgatcatatggactccttctgtctggagagtcttgatcttaatttctggtaaattttatattatccctttgctattactatttcctttttctctaatatttttaagctcctatcaattgtgttttgggttttctgtttttatcttctaatttatttaattgggggcaaatttgaaaatggaaaaattgacacaaaatgtttataatttcaaattttttccctatgtgaatgtttgctttggtataagtttatctgcttggataatgagatgatttagaagaatgtgagagcttttgcttaattcatttttctgacttcattgcttaaaaatatagcatttgcagggatatgtatatttcttctgggaattttaaaataaatgttatataattttgacagtatacaaacttactgattataaatctttgtatggctcacttcagagcaacacacagtttgacttactgtatattgaacttgcaacatttgagcctcagctcatctgtgtgcatcaagaaatctaattcccaactgcttcaaacatctttatatttccaaaaattttgttgtaagcctctgaatttctggcaacaatgtttaagttattgccaaatctaagtgattaaggatatatattgacctttttttgatgtatatatccaggtctcagttttcaggtgaagattatgacacttctgtatggttttggacataaattttgtagtcaagatttagttatattgtaagagacaacatttactgaccacttattatacaccatttatggtgctgacagcattagataccttatatagttcttataacaactctatcatgcaagttctactaatgaactttattttatgaatgaggaaatgaaagcttagaacattaaagttgcacacataataagttttaaggtctggttcaagtccatttgtgtgactttaatggccaagctcttttgcactattttattcttagaagtgcagatttgaactaccaccttacagtgtattttcagtgtcagggtgcaaaattttattcagaagcatagcacgtaggaggattattaactaaaatccatttaattagagcattggttgtttgaggaacttatgaccttaaggaagaaaaatagagttggaccacagttagtagtatttgtatcctttgtaggttttatttaactgtttactagaataaaacaataagacaatatgacaaataaagtgaaaatgattacacaatttaactgtgtgtttatcagtagcataacattacctttcttagacccgtttttggttctacatcccccaaattttaatgacatgttcctttcatttttcaaattaacatgattactaagggttttatgtgtatatgtgtgttgtatttctgtagtttcatatagttattcaatgccacttttattttaatttgttgaatttatgtttgagagttgaagcctactgccagggtctcacagtgatcctggaaacagactggctaacatggatgtctccaagcgaaaagccttggatattggcatttctcaaatctccttcaaaatacatgagtataacagctttttctacctatgacaaattcatgacaggactaaaaggcaaagtagaatactccaacctggttcaatcagtcccatttgcacaacttgtattcacttgtattcattctacctctaactccctgccaaacctcttgcatttctgagattcaagtttacctcttttcaagtagttcttaaaaatatacatataaagttattatggttgaaaacaaagtataaagaattacaagcactttgggaggccaaggtggggggatcacctgaggtcaggagttcgagaccagcctggccaacatggtgaaaccccatctctactaaaaacacaaaattagccgggtgtggtggtgtaattacaggtagagtatctgtaatcctagctactcaggaggctgaggcaggagaattgcttgaacccgggaagtggaagttgtagtgagccagacagagccattgcatctagcctggcaacagagtgaactctgtctc

SEQ ID NO: 115 - DNA, 4265 bp, Homo sapiens
cttttttttttttttttggcccagctgagtgcagtgatcttggctcactgcaacttctgcctcctgggttcaagcgattctcttgtctctgcttccggagtaggctgggattactggcgcccaccaccataccctgctaatttttgtattttttagtagagacggggtttccccgtgttggctaggcttgtctcgaactcctgacctcaggtgatctgcctgcctcagcctcccaaaatgctgggattacaggcatgagccaccgcacctggcccacaaagtactcttaaaatgttacttggtattaatttatcacatcagcttgtgaaggtgactgaaagtttcatgataagttatgcttttaggagttttataatgtcttaggaaacttgtataacttcttaatcaacagcttcaatagattaaacttgattagtatgtcattgtagattgctctctaatgaagcaagcctgaagatcatgagatgggatgagaatgagtgggaataatctacctagaatacctactttggaaggtgagcttagtaagtaggtaaccgtgaggaattgtagagtttatgggagagtaggtcaggaagagaatttgctgaaatacactagtgccaacctatttattttggttctgcccattcctgatgcttagggttccagtccatcttttttgtgtagctcagataactccatcttcagtatgaatcagtagccctgagatttgagtatagtgcaggagagtatggagccatttatggatggctccaagaaggggactctagctcagagtcgaacaagcccatgtgatgatttgagctctgagagagctgctaggaggaaataaagagttaggcactgaggctggataaatctatgaaggcttctctttcataactcttagtaacatttaggtgtaactgcagggctcaaaagaaatgaggacatgggatgctcttagaattcagagggataagggtttaggatattctgtatgtgtgtgtctctttgtttctgtctgcctgcctttctctctcttgctctctctttctctctctctctctcatacacacacatatacacacagacacaaacacacacttgcacacacagacgtatctccttgagtaactaaaataaaggctgagtgggaaaaatgtggtaatggctgagtaagaccttagagagttgtagtataacccactgccgggttcttttctcccttcttccacaatagagatgaatgtcaagagaataattctgagatgctttggagaaaattgacttgagagctttggagaaaattgacttgagagcatattattttatgttctactcagaccttttctccagtctgctgaagagtctgtcctccaaaatctttttcagttgcttgttctcatttagttattaatagaatgagtatcactaaagttatagaaggaataaaggatctcctaatcttttttatttttattttttgagacagggtcttgctctgtcaccctggctggagtgcagtgacaggatctcggctcgctgtagccttgacctcctgggctcatgcagtcctctcatccagcctcccaagtagctgggactacaggcatgaatcaccattccctccatttgtttttttttttgttttttttactttgtgtagtgtcagggttttgctgtgttgccctggctggtcttgaactcgagcttaacaatttgcccaccttggcctcccaaagttctgggattataggcatgagccaccatgcccagcctagaatctcttaatcttataaacaatttttaaaattaatccagatgaatccagaaagttgcatctgaatcatgtagggaacaaagtatatagatatagcctggtatatagtctggtatatttttttatacacattctgtatgttttaaagcttagaaaacatagtatattattgtaggggagtaagtgtatagtactgtttcatgaggaggtcaaaataatgtttcatgaggagtcaaagattaccgcatattcaaaatttgagcttgcttatggatttaaattgggaaatggagggaattattgtattatacaagccgagatattattgttttcatggagccaaaaaactgcttattgacttcaaaggagaaaaaaaaggagacagtgtcacattactggtagatttaaatgagtacttacttgtccacttatatctttgaaagtaaaatagagtttttttagtctgatattattttttaggttttcccatatgcaatgtcttactacatctaggcctaatggaaattgcagtgtgtgagattcatatgccacaatctgtcttcagtttactctgactttccatacctttaagcactaaagtaactataaagttggagttaatattttgtttctcacatgttttcagaatgatgcctgctcatcttagttgttcttggcattctctatcagagttcattgtgttgactagagaggttgactatacagaacagtgtttttatatgtgtagaacaccgtacttatgtagttgaacatatcaaatcttattgtaattatttatttatgagtctttctcctcaactgctgtccactaattgtgaaaatatattggaaaggcactgttattcatttagcttcatggaatggtaaatatcatacgctcaatgacattttgtggcattttaaactgaatatttcttgagtagaattcttttttttaacttttgtgtaggtggggatgttggagattatatgcaatttagttcttaatttttctatgatcttatgagatcatagccaaccaatgggaatgtctaaatagattactttgcttgcgtaagttattactattattgtttattctgcctttgtttcattctagagtaaatcatagattctaggaagaaggaaaatttgaaattttgggcttaatatttagatctaaggtacattaagtgataccttaccctcctgaaagagtgaatatatttggtttattctcaggtaataatttgggaagtgtaagaaaatatggatgagtgaatttcctacaacattgtagtagaagtatcatgtgaaattgatactcaaagacctgtctaagaaggctagcattttataaagtattacgttagtaatgaaatgttaccttccaaagacacaaataactttttcatgtacttcagtcttggaagttatcagaagaaacatagtggcataaaaactgtgcaagaattttagccttatttatgatactccatctatatgcacaaatgagatgtaatcatgtaccaaaatacatttatctactgtttcttgtttaggaataggtaagaaacccagatttaaatgaaaaccatttgttttatcttattttcttgcctaaagcaaagagttgattgactgctataatatgaatttagaggtaactaaaatcccaatattgttgaaactacactactatataacttgtcagttcttagggatgcacataaaagccagatacattttcacttgctcagtgtattgtgaaaagtctaatggggctttttttctctcttgaaaattcttcatgggctttgagttacatctcaagggctgtgttgtggttttacaattaacctcttatagtgaagagtatacacagatgttttatagtagttaactcattgtataccatattatttcagtgtgtatgtgcccagagcaatctatagtagcagtagataaaacaagagcaaagctttaattctaagggctactttagtattccctgtataatttttgttgctatcacttctcctggaatgttatggtaagaaagcttccagatccctagtttataatcacagttgcttctgcttttttcatgctgtcatggttccttaatgaaggtgggtgtttttttgtttgttttcattttagtttttaacatcacggagatgaattcttctatgctcttagctttcttgagatggcactgtaagctatttactccagaataaactgtcattttttcaaaaaaggaaacacaaacatagcattattgacagtaacataccttgcattgtttcagagttttaaaagtttataattttataaaagctaattttgtactaaatattactctgttaattcctttttacagtaaattattccaataaaatagtaattaaatgtttcttttagaggagattgattttcattttcttctttttttcctcagtatttttagattatt

SEQ ID NO: 116 - DNA, 3545 bp, Homo sapiens
catttccaaggttttgcaccaggagtagctgtccgggtctctggctagctcctgtcccaacttcttttcttccctcgacggtcgggagggatcactgggtgctacaccgctggggcgtcccaggcaggagagacttcgctctcagaagcgcccccgtgtcatccacaactcccacgaaaggagcttcccaagaggagtttgttttacccggaatgggctgcaggaattaattgcttacagagagtaaacttttgcccgttgtttttttgttttttgtgctttttttaaccaaagcttgcatttgtgctccgcgtagtttctattgcaacagagcgctactctgccttttcaactgtgagacagaggattgctgaggatttctgccctctggggcttcgcgaatatctatggcttcggacctgctagcggaaaacgcaaagttgcccagcttggagatggcaccaggttcctttgctctggcgctggatgctccgctccgccacccaccgccgccgtctccatcgagaatctcctcaaaatcaagggagttcttgactgtccctctccaaattggaaggcggttgactttgccgggaaccgagttcctgagcggcaaacgtggagtcgcagagcgcagaagtgaagatttaatacaaaagatgaaacttgtaggatgacctctagcagcgctactcacagctctgaaatcgatccagagcattccacagtgagcgttgcggctcccaggggctccggaccggtaacttcaggcgcaagtctgaatttcagggatgaacctgctttggattctgtttgagccgactcagtgcagaggcagtgacaggggctgtgggtttaggggtgatggatccatgaaggctgccacttggagcgagcagacagttggcgataccctcccactaacttgctccgctgctccgggctgttcacagacagacccacgcgtaaggatttagagtgtgtatgtccaacgcccagacttaacttctggtgcaattaagggaagagcttgaagctaacccgcgcagcttgcctgaagaagtgaataatgaaatcggtgatgaggtgctaaggaataaaaagaggcattttgtttgcgtgtgtattagtttgccaggattgagtttttaggtttgatgtcctaaaatgtatcttcgacagtgactcttttgcagcctttcaagaggaggatgttcggcagtattttggaacctggtatgaatctatacattgtctgcgtgccgcaatatttgatgcctcttcgagttctaattcttattcctaattaataaatgactgttcctgataatgaagtgggaataagaattataataaactatttccaacaaaaggccatctttaacttatgatttctgattgtataagcctatcaattaccaataaaatattctgcagactattaggcatgaattgcagagctgtaatgaagagactcacttggttcaagaaaattcagaatttagagcgactcctctccaaaaaggttgtgacttcaaattcctttcttggttgctgttggtatgcaggccactgtctgcaactgaagtttctgtttaaagtaaacataggttatttacatattcattaactttaatacgtgaagggtgccttacagtggtaggaaatgttgtggaaagtcttgtaccagccatggcgaagtctttttacttgctttgagtttttgatgtatgcgatgtgtatgcagtagtggtaatccatagcataatattcttgacatttaagcaccctcaaaaaaaataataaaaacctgtagatttatggatcctgttcaaaaaatggaagaggataaggatcacccttttccccctcgccttttacattttgcttttatgggggaaattatttaacaaacaaggagagcaaacctcaggatcagaggatgtaccccattcccgctacccttaggtctatctatggaattgaaaagaaactattgagactcaaagatactgtcagatccaagaatctgatttcaccaccaaattaaaataactacagcattattccagtgttgtctatgtatttatgttttctgataattgaatttgaaatatatgatatctcttccaatggaaacatcttgatccttttccctccttaagatcatttctctacaaactgccattttcagaacaccttttacttctctagagcatagcattcagtctattggtgtactgtcttttcatagataaaagctattctttctttactggtatgcctttgctactgtactgtgagctctgagagcacggatcttgtcatttacattgttgttccccagaatctatacagaatctagtacacaataaaatagatgtatatgatgatgatgatgatgatgaaagcgaccatgtattgagtaatgacttaatgactatgtaatgtgatttatgtacattatatcagttgatcctgtttacaacctgcttacctaaattttatgtcctcaaattacagggagattgaggcttatgcaaatttacctaaggtgacaaatctattttgtcacaattaagtatggaacctacacagtatctttctgactctgaagcctgcactattcatcattttgctctgttcaaatagccaggtccccacattttcaattattcaaggctaaaaggaatttatatgttgttaatgctaaaaagaggcaaatttaaaaatgagttccttacctctcatgcaatcgagtcaatatctatttgagtatcaaaacacaggaccagtttacttctcttattgggttaaaataggagagtgtcttcttggcattattttcatgggaatgccaaatgctgagttatgggtttcctttcagagaggggagtcaggccattgggaattttatggatatagaaaactttttattgtttacttccatgttgatactcttatgtaaaacagaggaggctattataaaatctcagttgtgtaagatgaataaattctagagatctattgtacaataatgtgcctataattaaccatactgtattatacacttaaaaatgtattaagaggacagatctcatgttggctaattgccacaattttaaaactaataaaaataaaagcctcagaacacagacaacactgaatacagaatgacataggaacatgccatagaaatgtgttatagttgtcaatttcaacagctcatattataaaacatcttttataccttggatcattacagtacaaatacaaaatatccatatcatggaagattaagctgctatgtaaaataatgaggaaattctccttaattggtataaaaaggtctccatgatatttttaggtgaaaattgcaaggtgaagcaaggtgttgtctccaaaaattaataaaattggttggggtcatggtgtaagtgggcagatggtatcaaaggtagaggttagactttttatgttcttttgattttggaaccgtgtgtaagttttaccttacaaaataaaagagtgcctttgaggggttg

SEQ ID NO: 117 - DNA, 1060 bp, Homo sapiens
gtcacagtgaccgccaccgtgccggggatgggtccctgagacttggcgaagtaggagccctgtgtgatcgtgcgtcagagtcggggctgagaccagccctggccagggcagttaccaggacggtctccggaggccgggattcgcggagggtccaccagcaggaagaaaccccaggaggaagaaacctcagacagatcgccggggaggcagcgcgggatcccagcctcaggcgtgcgcggacggtgtgcggagtctagctttgtaccaggctgcagtgcagtggtgccgtctcagctcactgcagcctctgcctcctgggttcgggcgattgtcctgcctcagcctcccgagtagctgggattacgggcacatgccaccacacccagctaatgtttgtatttttagtagatacggggtttcatcatgttgcccaggatggtcttaatttcctgacctcgtgatccgcccatctcggcctcccaaaatgctgggattacaggcatgagccaccagaaccggacatgctttccttaaaagctaaatattttaggcttgtgtgccattaggctctgttacaactacttaattctgcttttgtaattctatagcacccattgataatacataaacaaatgagcatgaatgtgtctcagtaaaaatttgttcacataaacaggcagtccacccatgaagctatagcttgctgaccccttgtttaaacaatcaattgaattcaaacagaaataaaaggatcttatatatttaaccatgttgataccatttccagtgcttttcattcttctatgtagatccaaatttccttttgatattattttacttctgcctgaaactttttctttaacattttttatagtgttgttttactggtgatgatttctttcaggttctaagtgcctgaaaaaatctttatttcacctacatcctgaaagatagtttctctgagtctacaattcccagctgacaatgtttatcttccagtactttaagatgttgcttcattatcttctaattttcttgtttccaataaaatgtttgctgg

SEQ ID NO: 118 - DNA, 202 bp, Homo sapiens
aagataaaattttgaaatctggtaggctggtgttagggtctttgtttttggggtttggcagagatgtgtttaagtgctgtggccagaagcggggggaggggggggggtttggtggaaatttttttgttatgatgtctgtgtggaaagcggctgtgcagacattcaattgttattattatgtcctacaagcattaatattaat

SEQ ID NO: 119 - DNA, 3540 bp, Homo sapiens
ttttttttttttttttttttttttgagatagagtcttattctgtcacccaggttggttcagtggtacattttgggctcaagcaatccttccacctcagcctcccaagtagctggaccgcagatgcacgtcaccacacctggctaagtttttgtatttttggtagagacagggtttcactatgttgcccaggctggtcttgaattcctgagcgctagcgatccacctgtttcagcctcccaaggtgctgggattgcagggggtgagccaccacgcccagccaattttttttgtataagtatgtctcaattattgcattggacatactgaaaacaagtatttaggccaggcatggtgactcgcacctgtaatccgagcactttgggaggccaatgtgggaggatctcttgagctcaggggttcgagaccagcctgggtaacatagcaagagcccatctctaccaaaaaaaataaaaattaaaaaaatttaaaaattagccagtcgtggtggaatgcacctgtggtcttaggctagttaggaggctgaggtgagaggatcgcttgggcccaggaggtggaggttgcagtgaaccgagatcacaccactgcactccagcccgagggacacagcgggaccctatctaaaaaaaaaaaggtgtatttattgtttaccttaaatccatttttttttttgagacagagtctcgctttgtcgccaggctggagtgcagtggcacagtcttggctcgctgcaacctctgcctcccgggttcaggcgattctcctgcctcagcctcccaggtggctgggactgcaggtgcgtgccaccacgcccagctaatttttgtatttttagtagagaccgggttttaccatgttggctagggtggtctcactctcttgacctcgtgatccgcccacctcagcctcccaaagtgctgggattacaggcatgagtcaccacgcagggcctgaaatccaaatttaacaggatgtcttttacttttatttgctaccctacccctacttccatctccaagtatagtttccttgatggcaaaacatgtttctcactggtctctgaatccctgaaactagcccagtgcacgacagttcatgctcggttaatatgaagagaaggcaacttatctggctgcagcgctgagaatggttggagggagttgtgactggagacagtgagaccaggtaggaggatgaggaataaaccatccaaaaaattatgaaggcttcagcagaatagcactggggatagggaaaggggatggatctgcaggatctaaggatttggtgaccaatgcttaagggacatgacagagcttaaggagcctaggagattgcccaagtttctggctgtgtcactggatgaggttggtgcactcactgagcagggaacactggggagggtctggaagctggacagcagggaagctcattgatgtgaggagcagagcaggctggagaagggtggacagcagatctgaaggaggaaacggaagacatccagtatggatatgttaagcttggtgtctcccaggatatacagatagaggtattggaattacagacttggggctcaggtgaatgttctaggctggagataaaatgtgagcatggttagcatggaggtggtaactgaaaccacgggagtagacagtgctgctcagggagagagtagaatgggaagaggagagagagtcggtatcagagctctgaggaacatgagaggcagagagaggaagaggaactcggaagtcgtctgagaacaagcctctggaggagtggaaggagaacccggagagtattggaccaagagagtcacggggaagacaggttttcaaggaggactgacactatcgaatgcttctgagacttcaaaggactaaatggcctttggctttagtattgaccagagtcacctgtggccccaggagctacaatgtgccacctggtgacaggtatagctactatgtggtaaacagaggtacagctctgcagcctgtttcctttggggaaaacaaccttttctttcttgcttgcttcttgctttctctctctctttccccttccttccttccctctctccctccctcccctccttccctccctcccctccttccctccctcccctccctccctccctcccctccttccttccctcccctccttccctccttcactgtcttccttttgatttgggttgtcctgagttgcaaactgaggctaattcatatgggaatgtgttcttggagctgttgctgtcttgttccggactctgagatgttgagcacaagctgtctggggcccagaatgcagcctccagctggggtgagccctgttccctcaaaagctggcagcctggggaatgttgacagccagcacctttggcttgggctgtggccctctcactgtgagcattgtcagagatggcttcagtcagtctcctttactggctctggagcagccgtgtctactgagtggcagggtttggggactaggctaggctttaaagtctcactagcagggggctgcctggccccaataaccctggaattgacagaatgtccttctctgcctgcagccagccctctgtaaactgtatggccctggggccattttctttgcaggagggaaggtggaactaaggatcccgaatccgtttggaggcagagaggggccaacagggtgtttgaagggagcaaaggcatcgaaatttttggagcatctagaactggggcagtgaatgcagaagagtgggagcacacacacgtttctcctccttgacccagaatgggcacagccttcagagagctcttgccagctcctcactctagcctgggtgaagggggcatctgtgccaaagcaggaaggcacacaggcggattggaaggaatttctctcagcagcgtcaaatgcctgagggatctcgccctcgaccctctccatctctcatggtactctcattcacccccggctgcagctcctgcctctgtgctgacagctgtcacatcaatccagcccagacctccctcggcagctctagaccagcagatcccactgcctcctgacaacccctctggatgtcccacagttcctcagacttagcatcctttccaaatccatgcccccatctcatttccaaaaaagaaaaatcatagaggcctccccaatacaaatgcataggacatgggaaacaaggtttgaaaggatatccagaaaagcttagggatagccctggccttttggaggtgacttgggggtggtatgagaggccagagtcagcagtaacttctcctttcttccccacgaaggtgtggacttcttagcttcctgtccttttcgtaccatttgccaaattgaatttaaataattattactgtaattgcttacttattgtctgtctctcctggttgaagcttctcaaggagcagggatcatgtctgtttcacttctgtatccttggcatctgtcatataatcagtatctgacatattaataggtgcttaataaatatttgtttgaat

SEQ ID NO: 120 - DNA, 118 bp, Homo sapiens
ccgggcgcggtggctcacgcctgtaatcccagctctcagggaggctaagaggcgggaggatgcttgagcccaggagttcgagacctgcctgggcaatatagcgagaccccgtctccag

SEQ ID NO: 121 - DNA, 4462 bp, Homo sapiens
gagacaggatttaactcttgcattgcagtgagactactaatattcctgctgcatacaatggtctgaaattcttgaagaatgtaaacagataaagtaagttgtttaggtaagtgggccacttatgaacacacctgccattctgacatatggacaagtgttaactagtttcatgtaataatcttttttatttatcctgtaatgataatggtgataaaacttcatgcaacactttagaaagatgacaggacccttgcaattagcattactgtgggtgcctggtaagtgcagacttggtattgaaaaatatagtttgtaggtccagacttcaatgctaaccccaaatccaaggttcagattctagcaaatttaattctacctttagctctcctatggcatataaactgaaagctaggcaacttgtcattcaaatgagtttttaaaaattgagaccctggatctcaccattttagaatctggtggtgtcagcacatattaagaacaatttatgaaaccttgaaatgctattggtcaaatgttagctgtatactggtgctgccacattaattaatacatgccctttttttttttaaacaggcatttgttgtatgagaaaaaagtattattctattcagctagcaatatctggcctttgttgatatcttagtacatagctttaataatcatttgacatttagtatttcccagctaacaacggaatgcaatgattcatatctgttgaatggattataaaatcctagagggcagtcatcatgttctacttgcattttactaattgattaattaatctgaacaaagttaggatgtagttggattaataaatacaagactgattaagtcaagtttgcacttaatgggcacaacactatatatatttgttagttattatttttctttgtttcagtaaattagacaaaatttggtatataatatacgtaaaacaggcaatacagtgctcatcataaaatatattatataatacatgtagtttccttttattcatgcacttaattttatgtattcataaaagtggttgtatggaaaacatgcacccctcgttctctctaggcaagatgtttgttttcacgtaggtgtaacagatacaggaattgtatcattataagtagtacttagagtgaactttctgtactctctattctatctgtaagagccaacactgaaattcacatatgcatgctaagaatgtaagaaagaagaatgagctccatgcatttcaatgggaaaagaacatcacgatgaattgctttagtgagggataaagtaacacaggtccaacttcagacaacaaggatgctggcttctcattttgcattttacaaccatttgtccaatttttttggttgattgcactgaattgttttgttttggaaaaacagcaatagattaaaagaaagctctctgcacagaaaaaaaataagcttcagaggagagaacaaaaaaggcattattaatatagttagttatataattattctccttacaatttgtttcttagggcccagtagcagctttctgaactcactttgttggccacaacacttaatggattatcacacaatcaaagcagtctaattttatcacacaaaattaaagtatacctgctataaggaaacaagcaaatacacaagcaaagatatgaagagaagtcagcaatacttgaaaattaatcccatttcctaaaatgccacgtgtgcaataattcaaagtaaatgacaatatattatactctaagtccataatgttagaaaataaaagcctagttgttgcttgacttacaagagcaaaacaagcttacggtgcatgggtccgtgttgtttggcaagtagtcaataaaactgtaccttatgactttctctcctaaaggttctaatcaaaacaatttatttcaggcatgtaaaccctgcttttcagactgtagctattgtcagcatgtacagcagcatcagcaataacggatgcaatttttggattgagagtctcagagctcccccatctgtctcagtaatggttggatttcatatggatcaatacagcatgtcaactctagtacaaggattttccctctaacctttataatagcaatttctatgcatccaaccttgtccagcataaaagcaatatttgaggatattatgtaaaggagctggagctgacagagctggaaggacattaactaccagtaccctaattgctagggtccaagcattcagacattatagcccatttgaaaccttaaacttcagtaacaaaaagagaacatgttttcatacaagttaacttgcttgcctctatgagcataggacggtggtaaagaaaggaaagagatctgtaaacaaagccactgcttatttttgtgtgagggatatttggatgctccagttggttctctgaatgtatttctctctcatcagcaatgagatcggagaattgaatgtgatgtgtttgtcttagtaaaaggtataactagatcctgggggagacaaagtgttttgctttgtttctgctccagttctctactgagaaataaaaccaagaggattcaattcttttttctgcaatggacttatagctgccatgacttgctgctcagagccacaaggtgccgattgttatgtatcactgccccttagtggttggccaacagcaaacctttttaatacctacccaacatcacaggtttataggtatatagggcatgcaggccctcctctctgcttcttagagcaggcaacagagacttaatgtgcagacctgcccttttctaagatgatgctttgttttctctgtgtctgtgtaatacagagaaagagcaagtattctgggatcagacagagctggaattatatctcccctctgctattctctaactgagtgatcttgggaaactcacttaacccctctcaactttattttctccttccaaaatggaattagcaactaccttgctaaaccagtgctgtaggattaatttagaaaatgaaggagaatggctagcaaatcatctgtcatgccttctattattgttactaacatgatgctgatgattatggtcatgaacatttatgaaggatgtgatcttcccactattacgagaccaaagaaatgtatgaatgctatataaactgtactgtagtctctatgaagttactaatgtagtctgccttgatgagtgactctaagaacagtacaacaaaatggttcctgctttcattccagattataaattaatttagtagttgtggttgtgggttagattatggttatgtgaaataagattttaattcaatttgccacatatttttgggagcctattgcacaaaatgtgctgttctgtgtagtcattgtacaaagaaaaaagtaaatgatgtatgtgtttttatacagtttgcaagtcagtggatacaacagagatatacatttacctaaatagaaattagacagatttatagcaagtgctgtgggattatagaggcaaaagaagtcaatgtcactctcagagtagttttcatagagatggtgatatctgttgtggtatatgaagcagtatttttagagttggaataaaagaggaaacattctaagtagggaagtagtaaaggtgagtacttctcaaaagaatgtatgaagtagtcagagaataatgaaaaaattaaatgtagaaaaagcttgagttatgtgttagaaataataacaaataagggttagcaggatagatttttggaaggcctcgaatactgtgctgaacttttaaatggtgtactataagcattagggagccatgaactaatgtattttacattttagggcttttatcttatttcgggagaagacaatgcgaaaatgtgtttcttcaatattatcttttatatcaagctaaattatttatactcatgttgaaggtcatgaattattgtatacaatgttgatttatcttctctttaaaatattgccattttcatttataattcttttcattccttttcaacaatcaaatcttccattggcctatcattttattctacctgtcaatgttggctggttatgaatatttttctctactcctaaataattttattcttcccagaaaactaaatggttactgaagcagagaacactgtgaatatccaaattgaatcaatctgcatgtgatgtaaaaccttggactatattatgaagatgtaaaaattataaaggagcactgagacatgaatgaaattccccagagaatcattagatgatgtatcaacttgacaaaatactacccaagtatttgtctatttctgtccgtcatcactaacacttcccagatccaagacatcatcatttctcacctggactactgcattggctgaaattgaaaatctgaacttcctggttgactcctcggtttgacttctcattcattaaaaataaatgtgaactt

SEQ ID NO: 122 - DNA, 2180 bp, Homo sapiens
agtgtacaagattcccccaagagctcagttgtcggagcctcatccacctgccgctggccacagccccgtcgctacacaacccaagccttcgggagcagctttggggctgacaccactctctcaaaggaactaaaggattcgggagccaagaagaaatctttgcaggagacagacaaacactggcagtggctgacttggagaaccctggaaattttcaccatgaaaggttcccggcgcccaagaagccccagtgattcctgcaccgaatccaagagcgaccacgcaggagagagcggctccagcggcacgccatcaaatgccccaaaacgccagaaagtggaggagctgggtcctcatccaggtgcagaaccagctccggtacagccagctccccaccaccctgcacagctgcccctggagctgccccagggcccacagcttccccagaggaagatgatcatcgcggtcttggaaccaggaatggtcctgcacctgcgcctggggcaggagttcctggggctggacccacagggagccctgcgactcagcctcctcaatgtgcagctcctggtggtccctgagcaactcttgatgtccctgaaggatctcttgtaccctgcccatgcccgctggctcctgctcactagtacagagactgtctgggagattgacattgaaaatggatctgtgagagcccagagagcagagaatgtgtgtgtggcgccttcagtagaagagggtgaggctccccaaggcttcctgcccctgatgggacccccagcaaaccttgtgcatggagtcagcccttcttcctggcgtgtcctctacctcaaacctgactacagagcggccgtcccccagggctcatcccaaatgcccaagcctagtccctggagacaggctctgcctgaagaattccacttggatctccacggcctggagcccctgcccacctctgccctcagacctctacctccatcacccagtccggagcccagaatttgccacaagtttctatggaggccaacgtgcaaggcccgaagacgtctcttctaaggctcatgggccatgcaccctcaggcaccagacgggaatcagagacgctctattcagaatgaagcacacctgctttttcatggtgtctccctgcacacatgtctcggcatctcggaggagagagatgctgcgcatgctggagaggtggagaaatgctccgtcctctcacctgaacctttgctctgcctcagatgctcttgatttgtatcaaagagcaaccttgagattggggcacaaaatatttgcaaatctcatatacgtgcaaggactgctcatactcagaatacacagagttgtcaaaactccaatgggacaaacaaatgattctgttcaaaacccagccagagacttgagcagacatttcctcaaaggggatgtaaagaaccacttcaaaaagcgttcactgtccctcccctggggaaatgcacgtcaaatacaccttcaacaacaaccaagaagctctcccagaagccaccgtgacaatcactcaccatcccaagggctgcggagcatgtggagaagctggaacactctgacagtgctgcttggaatccaactgggacaacccccagggagaaagagtttcattgattcataatcaatgcaataggcacttagcattggaaccatctttcccaccctgagatagttgttctaaaggaattagaactcacgtggacaaggctgagggcagaggcttctagcacctgtcctcacaatcgccaaaagatggaagggccttcaatgtcgttccacagtgtctagagagaggaactgtgacccattctttcaatgggatgcagttcagcaatgaataggctgggattgttgttggtaaattcagttctaagaatgagtagtgaagaacttgtcgaaacacttgaaggtatgtttggactcttacgctatgtgagacttctcctgagattgtaactctcatgaaattgacatgcacatcaagcatgtgtgatcgacgttcagtttccaactgacgtttgctgtaaaacacatactagattttgcatctgagaatgaaggattgtagcatgtatcttagtcatcactgtgacatcaattgtattggtgttgattatatctgtattccttgggttaaataaaatgtt

SEQ ID NO: 123 - DNA, 6205 bp, Homo sapiens
tttttttttttttttttttttttttttgagcatttatgaatggctgtgaacttcttctaacttctaacttcaagttgtctccttttggccctaggagtagaatttttctttaattctcagctggtgagatctgttgccaccacagttcaaaataacgattaagtactgaggccagcccatgcctgatccttcagtgatgttaggaaggtgaatgcttggctgtttgaaagcctccttattgtcatttccaatccattctctctgcttctattccttttctcccaaaacatttcagtgttgtcagttcatactctggagtctttggaaaaagagattgttgtctttttatgaatttgtccaaattttagttgtttctggttaagtttagaccaagagggatccatgtccctacaggattacccctatttcaaccagtagatgaggaatatccagctttaatttgtcagagcaaaaatccattaatgttttctcattactcataaaaaaaatccaactccttactgtggcctataaacctctccatgattggccctccttaatttatctcttttagtcttgaagtttcaggcacacctccttttcttttattgaaattctcaaagccaggtacagtggctcacctgagtttattcaaggctaatccgtaattagggaaataaaggttacagctgcctgttagtgactcaggtcgtataatcacattcctttaaggctcaaaataacgttccaatagctttgattttgaattacttattttcacaagttctataaaattacagagttctcatctatttttgttggcagctgtttgcctagcagttgaaagtgcttagcacatgatagtatatgataaacatttgtttaatttatttcaatattgtcagtccatattccagcttctttggcaaaggagactgttgtttttatatgaatttatccaaattttagttgtttccagctaagtttagaccaagagcccccacagaattacttccatgtcaactagtagaggaagagctttaatttaggatttaaatgccacaccacaattatctaaagtgactgaattgagctactgaataatagtccttctaaagaagattttagacacacatttcatttctgttattgctgacaagtgttttattttacagaataaaaggcatcttgcctgggataaaatttcgaaaggctgtgtttttgtagcactttctttttggaaggatctctttttagctactctgtgtcatggtgatgttgagttctctgttggaagctagagttcctgggttttttgatgtttctaggcttttgggttttgtttaagatttgtgttttgggaaggaacatttccatggttacgcccattccttctaccatccttgaaaaaacgagccagtagagtaatctgattcctggattactactacacagatgtcttttgtatctgcctacacatgaaactgctaggcaagttccatttccatgcatttacttccttcagtgctttttaaaaatgaagcacttttaagattaggaatgaaagacttggattggcaagttaaacagggattggcctacgttatgttaatagtctaaactcaatgtaggattaatttagaggtacagtatatgaagggagagactgttttgggaacaactaaatcgaagctttgagcagaatttgcacacatgtgagtaatactatatgcagaaagactgctgtacttaaaaatagtttcaggtttttaaatataaagtttcatgttggaatagtaaaataaaacatatgaacttttactgacatgaagcagtaaaattaacttttccttggaacagcttgcatgctcattgctgctccacacaacctaggttaaagatgcccatgatctagcagttttcttctctgaacattgcagagcatttgcacagacatgcttgaatttacactcatgagtcaatttcaagtaagaagagggagtaagagagggacctccttctcagggttaaggaaggcctaaattatgaaaaagtagtgcagcttttttcttaagttaaagtaacggtaaatttacaccacatttctctatgaatccagtatatgaaaagtttaatttgcgtgttaactattgctgtgcagacagcttgtcaagtgatgatttgacagcctggtgtctgtctccattctgctggaacatcagacgccatttctcttcttcctgagaaaaccacctctcatactttggtatccctctaaagtgtttcaattgtaaattactactaatatataattactattcatttatagaagcttctagcttaaacataaaaatatactaaaagtgaaacaaccgtaatcttaacctctagacatagattatttttctatgaacacattaacatatatgtcatagttactattgttttttacaataaaaggctcatactatacatacatacaacttgttctggtatatattttgaatcttcataatagcatttgtagatatgctttattttttgtagttttgtttttttctttagccatccttgcaaatactatgtattttgcttccttaaatcagtatttcagtaggaaaaattcttagaaattaaactgtgagggcaagcaattgtgaacatttacattttaataagtaccaacaaattaccttaaaacgtgtaccgatggatactcttagtaaaatgtaagagagtgattcactacattcttactagctcaggcattatcaatttttttttattttaaattactgcctaagaaatacagtcatatatcttgttcttttattttaaatttctatttgagaagttatgcacttttgtttgtttgttttttgagacagagtcttactctgtcatccaggctggagtgcagtggcacaatctcagctcactgcaacctctacctctcaggttcaggtgattctcgtgcctcagcctcccgagtagctgggattacaggcgcctgccaccacgcctggctgagttttgtattttcagtagagatggggtttcaccgtgttggaccagctggtttggaattcctgacctcaggtgatccccccactcagcctcccaaagtgctgggattgcaggcgtgagccaccatgcctagccagttacacacttttaatgtgattattaatcaccattatttctacttattcaagctgactgttcacatattttactctttttaaagcatgcattttaaataaattgataataaatgtttttgtcaaatattgcacgtcttctcccctacatttattgaatgcttactgcatgctaggctctgtgctaaatactttacatacattattccatttaatcctcacattaatttggggaatgtgttattttcatgttcacacaaggaaaatgggttcagagaggttaaggaatttgcccaaatttacagttagtttatttttatttttattttgagacagggtatgtctctatcacccaggctggagtgcagtggcacgatcccagctcagtgcaaactccgcctcctaggttcaagcaattctagtgcctcagcctcctgagtggatgggactgtaggtgcctgccaccatacccagctaattttttgtagaggcagggtttcaccatgttgcccaggcctggtcttgaattcctgagctcaagtgatctgcccgcctcagcctcccaaagtgctgggattacagccacgaaccactgtgcccgctccacagttttagaagtggcattcaaacagagctcaatcacaataaaaggcacatcacaaactatgataatcccccacctcttggattgtcttttatctcttaactttgtggagggtttttgctttgattttgtttgttatgttataatgaagttttaaattgttaatcattccatatggtgtctaggttttccgccatgattataaagcccttccctagccccatgtgatacaattttctttcttataatacttttatatttcatttctttttaagtctttggtatatctgacagcaatttatgtatgattcagatgtatatttttttccccaaaggtcccaacacctttactgaataatctttttcccataatttgagatgacacctttatcatacacttatatgccctgtatatttgagtctatatctggactcccttctggtataaagaagtgcagttgacttttgtataacgaccttatacctgtccaccttgttaaaccctcttactatttctaatatcatgtctacagattctgattttctgttaaaatggttaataattctgtctctctctcttttttttttttttgacatggaattttgctcttattgcccaggctggagtgcagtggtacagtcttggctcactgcaacctctgcctcctgggctcaagtggttctcctgcctcagcctcccaagtagctgggattacaggcgcctgccactacacctggctaatttttgtatttttagtagagatgaggtttcaccatgttggccagtctggtcttgaactcctgacctcaggtgacccgcctgtctcagcctcccaaagtgctaggatcacaggcgtgagccaccgcgcctggcccttaacatggttaataattctctgataaagattgttctagtctttttcaatcctttctcatccttttgattcaacttatttttcttatgtgctattgaagtccttcaagtctatgttgtttttttttatttctaaaaataaaaccaagaataccagaaaaccctaaggctgaagtaactgaaaaccaaactcaaaaattgatctgtagggttattcagttactctgttggttagtcaccaggtcgtgtaagtgcaagtcctaatcaggaaaaaccaagactttgtgaattaggatggggacactccagaggattcggagacctccttgactccatggagtactctgaactcaatgccttgagcctcctctgcttgtcaaagcctttccttcctcttaatcctcccgagggtgttttcctcctgacaccaaatgtgtgatgtccgttctaacaccagccatttctccagttctctagacatcaaccggatgtccaataattcaattaaattctgatactgtctgcctgcgttagcatccacccctacaagttaaaggctcagtcccacaatacttccctacttcagatgtcagctgtaaatggggtgcccaggtgatccacatttctgcccaggtgactacaaatttgggggttcccatggccccttcccctcagtttctataatttgctagaatgcctcacagaactcagcaaagccctgaagcactgattattctcattttattataaaagataacagctcaggcctggcacggtggctcacacctatagtctcagtaacttgggaggttgaggtgggagtattagagcaggtagttagacgtgagcagggcagaagagggtccttccaccaccaggaatgttaggcaaccatcaggtgatggtcaggtggttgttaactgtctctttaaaataataattggttgcagccagtgctagggaaaggcagtctcccaacagatagaaaacacctgaaactggtgactagcagcttcccaatatgatctcaggagttgggtgagtgggctcaagcatgtgcactcaaaggcaaaatggcagagtttaacgggtatatgaccttcctctaggaacattcaacttgtaggaaagaacgcctcaatgtgcatttgttcaacttcagtaaacacactgtgcattggccccctcctaagtgctggcaggccaccgcacatgcagaataccagcatatgaaaccccaagtcagaggtcaaactgggcacttgaactcctcaagactcctgcttggctatcttccaagtgtaccttacattctttgattcctgctttaaaactttttaataaactttcacgcctgctctaaaacttacctccatctctctctctgccttatgcccttcagtcgaacgaattctttctcctaaggaggcaagaattgaggttgctgcagactcgtggatttgccactgctaacaggaggattacttgagcccaggagtttgcgtctccagtgagctatgatgttatcactgcactccagcctgggcaacagagtaggaccctgtc

SEQ ID NO: 124 - DNA, 3912 bp, Homo sapiens
tttttttttttttttttttttttttttgagacggagtctcgctgtctcccaggctggagtgcagtggcatgatctcggctcactgcaagctccgcctcccaggttcacgccattctcctgcctcagcctccggagtagctgggagtacaggcgcggctaattttttgtatttttagtagagacggggtttcaccatgttagccaggatggtctcgatctcctgacctcgtgatccacctgcctcggcctcccaaagtgctgggattacaggtgtgagccaccacgcccggccacgtgatcttattttaaaagaacactgctatagaagaatttacacaccaaattccctgaaagctaaagtattgttccataacttacacttgaggcaatctgctcagtgtgtaaccactttataaaaaataacttaccattgataacctggaaggtggactacttgtaagtagctggtgtttattgattaaaccatggaagttttcatgatacccaagcatgttgctgaaactgatgcatttgaaagagctgttgaaataatgcaaaactttggttttataagaatctactcatgttttaaaagtatttaactctgtagaccacaattatagaaagctcagtaatgctgctaatgacatttgtaaactatatctgtaatgtagtgcaatatttttatatttcactgggagaggcagtagagacatcatagttgtactttagtgcaagtgggggaacactccaaatagcctagagtatagtaaggtacaaagcttcaatgaaaaaagctgtattatattacattactgatgtaatcttgctgccatgctatgtatcaatagctaaaaaataataataaagactaccacagaaaacaagaatatcttcatttaatgaaatctttaaaaaaggtgattgctgcatctctatggaattatcttctggtataatttggccatgcagaaaagcataacaaagtccacttttcctaaacaaaattgctgttttgcagactgccccaaaacattttttactattgtttccttatggattatcaagtttatgggtttcctttggctatgtattagtaattagactttaaaatatattttctacattagtattagctgagtgaatggcttagacaaactgagcaacattttagcattattagcaatcataataggctatacttcttcatatcaagccttatattcaatatcagaagtacttgaaataagtggctattttgtgatgctgggaggagaaaacacaacctaaaaattttgaggggtactatcaagttctaaatgtatagctgaattttttttaaagcaatttggaaatatttggctcttaaaaataagataaataataaaatgttaagtcccctaaaagtgaataaattttaaatacctacttttaaaaatactgtcttctaaattgacataattgcttttcttaccaaaagaaggagaggttcccctaattccttttgggccatagatccgcttttaggatctgattaaagatgtggactttcaccgcaggaagatacccatgggcacaccattcaaaatgtatcagatttcaacggttttacaaactcccccgggattaagtcaaatgggtggatattacagctgttttcatcagatatggttatttgttgacaaccatcaggacaacaatgtttatagatggaaggataacttcctgggtttttttccacattgaatgtggctagttacatatctcaatttaaaataaattgtggaaagccaaaaaagtatggtcaagctaacctggggtggcttttacctgatgcctacaagcacagaaaaatagtttttaattaaatatccacagtcaaaatgataccttatgtattttattccaacaacatttggtttataaaggaatacaaacaggcacaaaacatggttcagaagatttattaagtaaacttgctaaaatatggacagatacacttagcagtcaaacagttgaatattcattgctacctcattaaagtttttgtatctgtattaccaggtccaaacataaaaaccacctctgttcaaaaaataaatgttcagagagctgtatgttctttgttctggtatgtacattttaaaaaaacacctctttccagtcttgctaaccaagaatattagtcatataaaagaacttagaatttttttccccaagtacaagctatcttttgctccaaaacagttctgaaggttttatttatattttatcttatcccgagggaccaacagcaggcatacctttgccaggccttcttgcagaaagacacagagccgtaaaggcaaaaataaaattgcaataaagtatatggtattgggggcagggagaaccagaaaccctcaaagagaaccaatttgtagcacgttcttttttaaggctctacccctgtagaagtaagaaactagcctgcctttttagccatatgagagtttcctccagagccatcttccaaagtagcagacttggccaagttgcccaatgccaaataagtgagttggaagttcgtttgcttcaaacacactgcacttagaaaccagacttgaaataatcgaagccccacagaaaagcttcatgaaacgaagtgttactttcctagagaataagaaagtcacaagattgaggagtctgttctaaagttctttgctccttgatgtcgaagttaacacaaacacaatcttagcttaacgaaactaagtaatttttgtttatgattatagaactgcaggattctcaagtagtattagagacattccacactgcacactccagtcatatctcttaacaaaatgacataaattgacaatgttcactaacagtatttgctgttacactgaaaaggcacatcaatgttgtcatgcttagaaaaatacacaacactgcacactggatgatatagttagcacatacatttttagatgttccatttttcttttctgcctgatcactattatttttacttcttaatatatgattcaagacataatttcattcttcattttcatttaaaatttgtcttcacattgatgtgaacaactttcaggagtctaaaaaatagtagtttcagacaacctaaaataaatatattcctagaaaacacttggatgacctgcaaacagatcaaagatatagtcagatattaaagtcagagcagctgtttttagcttcttgtttccttttctaaaacttgaagtagatggcgattaaccttatcatgtttaaacaaccttgacagtataaggtacatgtaccctcaattttcttcatccagtaagacaagtatgcatcttaaagggaaagcttttagttcataacaatatgtttggttgcttttctctgctttcggaacatttactgtttttcctttattggctttagtgtttgctgccaaccagataacatgttaacatataatttacaactctctctaggtaggtgattacatagaaaactaatgccagctaagatttatggattcaaaagataactgacacaagttcttgtcctctacacttgagagaactagctgtttaacgcataaatatattgatagtaactacaagttaaataacattcagtgtcactatataacatgctgtcttacttgattctgtttttcagacttcattctagtttctctttgttggaagagtctcagagataatgtgtgctttaattttaaacactcattaccaatatgatttttgcccaaatgtttgttaatgtaagttaaaaaattatatttggtttggattcaaatatttatagatttacacaatacctatttcatcaaaatatattgtatgatatttaataaaattaatacataaaataagtttcaacactatttat

SEQ ID NO: 125 - DNA, 3689 bp, Homo sapiens
agtggctttggcctgtgtctggtctgaggacgccggaaggcattgcactgaggctaagggaaaaggtctctggagggagcctcaggaagagcaaatggaggccagagactggcaggagcgcgccagcgcaggatttaatcccgacgagcggattcagagccgtgcttatataaagcttcaggaagcgccgttccgacgatgaggtcgacacgcgagaggcgacctcaagagcggcggcgccagggatctgtgcgccaagggaggacgggagggagcaggttcgccataattcctggctccaggctctgttttgttggaccgagccactgtattttagctcacacaggagaattctggccctgggaaaattggtctcagcatgctgccaagctttctcatggacgtcagcgaatcccaacacactgtcggtcaaagccgtgctggaagaaacaaaacagttctccctcggtagaactgagaggggattggtccagggcccccgccgataccaaaatccaggttgctcaagtctctcatagaaagtggcgtagtatttgcacataactatgcacatcctcccgtgtactttaaatagtctctaaattacttcgtaacacctaatccagtgtaaatgctatgtaagtaattgttatactgtttttatttttactatcttttgttgtactttttttaaaaaagaaattcatttgtttaatattttcggtcttggggaacccgcgtatatggagggcctgctacatagagaagactgagggatattctgtgcatccgtttctacggatcctctaaatcggcctttgttttcagccaggatttagtgcccagctgtgtcctttggaggccccacatggagctagcaaagtttgctaaatcgggttttgcaagaggactgtctgctccatactgggagtagttaccgcaaactgccctatgaaattggttggggttcttactgttagcatgtttattactttatcagggctctctgtaggagagtctatgagaaaatcttctggtttctgctgaaagaatcgtgttttgttggggtttttttcccgaaaaatattatttttaaaaactcttctgtgccctgtttaatctctcccttggatccaccttctgtgtgctcataaatcgtaaatctgtattcagacttctggactcgagacacgtagatccacctggtggttcttcagtcattttaagcccaaaactcaaaatctcccgaaatcaaaatgtttaaacttataatctccagggtgtgactcacgggggatgaggggagcaattctctccctccccgcataaagctggttctcctgtctgctcattgaacggttccactgcgcatcacagcatctacatgcctaaaccaacaccccagcattggcaacagatatcttcctctcccttggctgcttcaggacagggaagaaacatgcttgcccttttctgactctttagtaactctggccgaatctatcacattattttacatctctttacatcttactactcccccatcttggctgtgtgttccctactggcagtgattttgtttattcatttttgtaaactgacacttagttcagtgtccaatataagctcaacaatagtttataaaaggaaaagttcctgcctttgattgcttttaaacactattagaaaagacataaccaaattgcaacatgataaaacaaccgcaaaacaaggctgagagaagtggtgatttctggtgtcagagggcacaggaccctgggcagaatcagagatacggtgtctgtgcagttccctttttaaggggatcaggacgctacctccaaatgtgccagtttcgacttaagaattattttcagctgaaacaaacagctaaaatcccttacctgtttaatagcagatcctcctcgcaaatctcaaatttttaactcagttgtcataaatcttcttcagcactagaagcaaatctaacctcggagatgagaagtggtcaccacacccaaatagacattgtcacaagactcgaatcttccatctattctaagggcccatttatcttttcaaaagtcatttggttttccatatgtcctttactcctcctccttttcccctgctgctaggtagatcccaaattctaaccactcctttgagttactcatcacagagtgctcccatgtatacacttttttttttttgtttgactcagggtcttactctgtcacccaggctggagtgcagtggtgcaatctcagtttaaacccccaagtctgtggtattttgttatagtccccctagaaattaatacaggattcatggtctgccaaagtctcattccctgctcagaccgacaatggatagtgggatcctttgtgatatgtgctctgtgagttagaagtagtaacttagagctgttgaggacaatacctttgcaccccatccactgaattttgttttcaaagatacagtctgaaactcccagagggtgagtgcctttccagtgtgtcagagccattagtggctgagcagaccgctgagcatgtagatttctaggtcagggccctctccccaaagaatcatactccctggttgaactgaacctaaatcaggtttaaaactagacagatgccaaccaacttaaaattccaaagatatccaagacctgcccatggccctgggatttgaggacaacgtgtgcatgtcatggctatggcagttcaggggtctctagcttagtgggaatgtctatgtcctaccttgacccttctgagtcttccgcccgcatctgcccctcctatgacaatggagtattcattccccagatacagcaccgtgaaagagaggcaggaacactggatagtctaagacctggtctttcttggctggtgtgagacagtggaggcctcactacttggtcttttctggtgtactgtcaaaggttgaagctggggccttgtgactgcctcctgttctctgttccagggatgctacacaatagaagctctgggccttgaccatggaaaggtcccatgaattctccactcagcccaactgagccccctgctctcacactgggtgaggaaacgataggcagtgcgaacaggtgtatgcacactcactgaggaagtgcagcctgtctgacccactctctctcacccagcctagggtcaggccatggcaggacactgtttccttaactatcagcagccatcttggggatttccccacagggccagggcaacagaatctgcttctcactgtgaccatggtctggaaggaccatgaggaattctccagtgctgtcggggtttccgatactgacacagacaatttagtaacagctttgacaccttttggtaataggacaaagttaacactcctgccactatcctgtgaaggccaaccttcctaggccccataggaaacttttggaatgtctttgttgggttgagaaactggggcaaagtagtacccaattttttcatgtcaatatcaaaatgtaatcatttcaggtacacagagttccgcactttcagattagtcttaaagaaaagaaaatcgccgggaacggtggctcgtgcctgaaatcccggcactttgggaggccgaggcggacggatcacctgaggtcaggagttccagaccagcctgaccacatggtgaaacccatctct

SEQ ID NO: 126 - DNA, 4930 bp, Homo sapiens
ttttttttttttttttttttttttttttcgagacggagtcttgctcagtcgcccaggctggagtgcagtggcgtgatttcagctcactgcaagctctgcctcccgggttcatgccattctcctgcctcagcctctcgagtggctgggactataggagcccgccaccatgcctggctaatttttttttgtatttttagtagagacgggagtttctcctcggggtcggagcaggaggcacgcggagtgtgaggccacgcatgagcggacgctaaccccctccccagccacaaagagtctacatgtctagggtctagacatgttcagctttgtggacctccggctcctgctcctcttagcggccaccgccctcctgacgcacggccaagaggaaggccaagtcgagggccaagacgaagacatcccaccaatcacctgcgtacagaacggcctcaggtaccatgaccgagacgtgtggaaacccgagccctgccggatctgcgtctgcgacaacggcaaggtgttgtgcgatgacgtgatctgtgacgagaccaagaactgccccggcgccgaagtccccgagggcgagtgctgtcccgtctgccccgacggctcagagtcacccaccgaccaagaaaccaccggcgtcgagggacccaagggagacactggcccccgaggcccaaggggacccgcaggcccccctggccgagatggcatccctggacagcctggacttcccggaccccccggaccccccggacctcccggaccccctggcctcggaggaaactttgctccccagctgtcttatggctatgatgagaaatcaaccggaggaatttccgtgcctggccccatgggtccctctggtcctcgtggtctccctggcccccctggtgcacctggtccccaaggcttccaaggtccccctggtgagcctggcgagcctggagcttcaggtcccatgggtccccgaggtcccccaggtccccctggaaagaatggagatgatggggaagctggaaaacctggtcgtcctggtgagcgtgggcctcctgggcctcagggtgctcgaggattgcccggaacagctggcctccctggaatgaagggacacagaggtttcagtggtttggatggtgccaagggagatgctggtcctgctggtcctaagggtgagcctggcagccctggtgaaaatggagctcctggtcagatgggcccccgtggcctgcctggtgagagaggtcgccctggagcccctggccctgctggtgctcgtggaaatgatggtgctactggtgctgccgggccccctggtcccaccggccccgctggtcctcctggcttccctggtgctgttggtgctaagggtgaagctggtccccaagggccccgaggctctgaaggtccccagggtgtgcgtggtgagcctggcccccctggccctgctggtgctgctggccctgctggaaaccctggtgctgatggacagcctggtgctaaaggtgccaatggtgctcctggtattgctggtgctcctggcttccctggtgcccgaggcccctctggaccccagggccccggcggccctcctggtcccaagggtaacagcggtgaacctggtgctcctggcagcaaaggagacactggtgctaagggagagcctggccctgttggtgttcaaggaccccctggccctgctggagaggaaggaaagcgaggagctcgaggtgaacccggacccactggcctgcccggaccccctggcgagcgtggtggacctggtagccgtggtttccctggcgcagatggtgttgctggtcccaagggtcccgctggtgaacgtggttctcctggccctgctggccccaaaggatctcctggtgaagctggtcgtcccggtgaagctggtctgcctggtgccaagggtctgactggaagccctggcagccctggtcctgatggcaaaactggcccccctggtcccgccggtcaagatggtcgccccggacccccaggcccacctggtgcccgtggtcaggctggtgtgatgggattccctggacctaaaggtgctgctggagagcccggcaaggctggagagcgaggtgttcccggaccccctggcgctgtcggtcctgctggcaaagatggagaggctggagctcagggaccccctggccctgctggtcccgctggcgagagaggtgaacaaggccctgctggctcccccggattccagggtctccctggtcctgctggtcctccaggtgaagcaggcaaacctggtgaacagggtgttcctggagaccttggcgcccctggcccctctggagcaagaggcgagagaggtttccctggcgagcgtggtgtgcaaggtccccctggtcctgctggtccccgaggggccaacggtgctcccggcaacgatggtgctaagggtgatgctggtgcccctggagctcccggtagccagggcgcccctggccttcagggaatgcctggtgaacgtggtgcagctggtcttccagggcctaagggtgacagaggtgatgctggtcccaaaggtgctgatggctctcctggcaaagatggcgtccgtggtctgaccggccccattggtcctcctggccctgctggtgcccctggtgacaagggtgaaagtggtcccagcggccctgctggtcccactggagctcgtggtgcccccggagaccgtggtgagcctggtccccccggccctgctggctttgctggcccccctggtgctgacggccaacctggtgctaaaggcgaacctggtgatgctggtgctaaaggcgatgctggtccccctggccctgccggacccgctggaccccctggccccattggtaatgttggtgctcctggagccaaaggtgctcgcggcagcgctggtccccctggtgctactggtttccctggtgctgctggccgagtcggtcctcctggcccctctggaaatgctggaccccctggccctcctggtcctgctggcaaagaaggcggcaaaggtccccgtggtgagactggccctgctggacgtcctggtgaagttggtccccctggtccccctggccctgctggcgagaaaggatcccctggtgctgatggtcctgctggtgctcctggtactcccgggcctcaaggtattgctggacagcgtggtgtggtcggcctgcctggtcagagaggagagagaggcttccctggtcttcctggcccctctggtgaacctggcaaacaaggtccctctggagcaagtggtgaacgtggtccccctggtcccatgggcccccctggattggctggaccccctggtgaatctggacgtgagggggctcctggtgccgaaggttcccctggacgagacggttctcctggcgccaagggtgaccgtggtgagaccggccccgctggaccccctggtgctcctggtgctcctggtgcccctggccccgttggccctgctggcaagagtggtgatcgtggtgagactggtcctgctggtcccgccggtcctgtcggccctgttggcgcccgtggccccgccggaccccaaggcccccgtggtgacaagggtgagacaggcgaacagggcgacagaggcataaagggtcaccgtggcttctctggcctccagggtccccctggccctcctggctctcctggtgaacaaggtccctctggagcctctggtcctgctggtccccgaggtccccctggctctgctggtgctcctggcaaagatggactcaacggtctccctggccccattgggccccctggtcctcgcggtcgcactggtgatgctggtcctgttggtccccccggccctcctggacctcctggtccccctggtcctcccagcgctggtttcgacttcagcttcctgccccagccacctcaagagaaggctcacgatggtggccgctactaccgggctgatgatgccaatgtggttcgtgaccgtgacctcgaggtggacaccaccctcaagagcctgagccagcagatcgagaacatccggagcccagagggcagccgcaagaaccccgcccgcacctgccgtgacctcaagatgtgccactctgactggaagagtggagagtactggattgaccccaaccaaggctgcaacctggatgccatcaaagtcttctgcaacatggagactggtgagacctgcgtgtaccccactcagcccagtgtggcccagaagaactggtacatcagcaagaaccccaaggacaagaggcatgtctggttcggcgagagcatgaccgatggattccagttcgagtatggcggccagggctccgaccctgccgatgtggccatccagctgaccttcctgcgcctgatgtccaccgaggcctcccagaacatcacctaccactgcaagaacagcgtggcctacatggaccagcagactggcaacctcaagaaggccctgctcctccagggctccaacgagatcgagatccgcgccgagggcaacagccgcttcacctacagcgtcactgtcgatggctgcacgagtcacaccggagcctggggcaagacagtgattgaatacaaaaccaccaagacctcccgcctgcccatcatcgatgtggcccccttggacgttggtgccccagaccaggaattcggcttcgacgttggccctgtctgcttcctgtaaactccctccatcccaacctggctccctcccacccaaccaactttccccccaacccggaaacagacaagcaacccaaactgaaccccctcaaaagccaaaaaatgggagacaatttcacatggactttggaaaatatttttttcctttgcattcatctctcaaacttagtttttatctttgaccaaccgaacatgaccaaaaaccaaaagtgcattcaac

SEQ ID NO: 127 - DNA, 3867 bp, Homo sapiens
ttttttttttttttttttttttttttttttgccttcatcacggaccccactggagcaccaggcccgctgccgcaggatggaccgaccctcactgtgcggcgcgttcgcagcccccggatccctgggcccggcctggccttcccggcaccccctcctcctgcattcccgcaggcctggcccgcgcccggcttctccttctagaggcttcctggctgttcgtgttgggacttaccaaggaacttcttccggataggcttgttcagagctcatttaatgaactcggggaaagtagcttcccacgcgcgcatccatcgtgcggaccccccgggggccgctgcgctgaggggtgagggggtcgctggccgcctgcgggtccctgaactccggggtttccagccttctcgaggtttccatggttacctggctccgaaagagacgacttctctttccctccaccctgccgcagcatcccaggccctcgctgggggatgagattggggaggggcgggggggtgtgcagggcgggggcgggggggggttctagggccctcctcgcctccccacccagacacgggaagcgcccaccctggggtgctgcaggccggggcgccgcgggtgccggtgagaggagcagggccggtcctggggacccgcttcgggggtgggaagggctgcgaggcggggtcctgctccctcccagcggaaggcggcctgggacccagtcagaccgcggtgcatcccaaacctcccagcgacccttggttggagaaacgggcagagaccctgcagggggtggcccgggccctgcgtgtcctctggggcctttgccgcggcccctccggcgccccgcaccccactggaagtgctctgtgtgggtgggaggctcagccctgcgcggtggccccaggaagtgctgaaatgaacgaggtcccctggtcccgtccccggggcctccgagactaaagggacccgcagcaccagcagggtgccccaggctggggggggtcccaaacgcggctcccagatccctccttcccagctggagtggagaagagccctctcagcctggttcctgccgctgagcaaagggcggacacttttcttggattttagttttgaaaacagtgttcaaagcgtctctttgaactgtagatttctgcagagcaacggttttgggagcaaaaccttgataccaagttttactcaaaacagaaagtgccaggtagggaacagaaaaggaaggcctgccggtgcgtggcttttcccagagcttggcaaaggccttgttaccttaaatttctagtctcaaaaataaaatgctggtgccacactccccgacacagagccggcctcactgctgagtgtgagagtcaggcttgaaacatctgccttcccttgaacgtgctggtgggcatcgctgtgcaaagcatgacacctgaccccgtaggaaaccccttcttactcatttgcagtgtcactgaaagaaacttatctcctgtgcctgttaactgtcaggtatcactaaagttaaagcaataaagctcacttaagataaaatggaaaagtgagaaacagcgaaaatgtcagtgcagacgtcacaaactcagcatgagtttcctcgaggcatgacacgggtttgtgattatgaccggcaggctgagctgtgcccagcgtgaggcgtttgccccagtgcaggcaggaggggctgcagtgggctccgcctctcggaggacccgaggctcccccagggccctccccacggcccctgctcgctttgtggagtgggtgagacttggccttctctgctgactcaccatacaccactccaggccctgctgccccaggccggctccctctgcctcctcagtgcctgttctgggccccagaagaggctggaagggtcctgaagacctcgatggcctccattcagctagggagcagattcgggggaaatgaggagggaggtccccagggtcacccagaaccgagggaaagttgtggccagagagctgctcgcttcccacaaacaccacaatcaccccttgcaggataaagtttcgcacaagttgctgagtgcagagaacctgggccagaaggccaggtcctgagttctggaacaggtgaggacccacccaggctgccccatccctccaccctcagtgaatggcgacagcctctgggctttctactgcctcttggctcccaacccagaccaagccccttccctctgttgagcctggccgtggagacgggttcaccccgacggctgcgtccaggcgtcagcagggctggaggagccctgacagaatgcacttggcccaccaggccgggcatgtagcgatgggtcagggtcctttctggtgggccagggactcccaaggcccaggaccagggttccagagggaaggacagcagggccccagctggatcctgcatccagggctggggcatgggaagagaaaagtttcaggagctgagactcagcccttggccccagagtctcagagggcagggccaagggccaggtaaggacccacagaggcaggatggtcttcagcacagacacctcatcattaagctcttcctcatgatgctgtagacatgttctccttgactatggagaggaaatggagccagggggatgcagctggtaccagctgagagagagagctcagagagagtgtgtgtgggcacaggctccagggatgcagctggtcccagccgagagagtgagctcggagtgtgtccagtcacaggctccagggatgcagctggtcccacccaagagagtgagctcagagaaagtgtgtccagtcacaggctccacggggagggggagcaggactgaaccttcctctgcccgcagagcctcagtcctctcagtggggaccacaggacctgggcacatcaaccagtgctggcagagtcccgaggcctctcccaggagagctttggccagaggtcattagaagccaaggggtgtctctgtgttgcagacactcactggagcaggtgcacagccccaaggggtgggtttacagcagctcaggcggccccctcacaggagcctccagagccccttgatgtggccacagcacagctggccccttacagggtgtgcgtgggcagaactgataggtactgctatacctctgaggcctgtatcctctcttgaaaggggacacctcatcccagaaatccagcaaggtggatttattgagaccatctcactgaaaacagcccaaaatgatggatatcatgtttttaaattcttcctggagtttttgaaaagatgacaaaggaaaggcgaacccagagaggctattgcagcaaagttaagcttcagtccaggtggtcttgtggggatggagggtggagatgtacaatgttcatggattgaaatagtcaatatgtaaagatgtcagcttctctcaaattaatttagtcagtataatcccaaagtcccagcaagccccgttttgttgtactgttttttgtaaagcttgataagttaattctgaatagctaggaagagtcaagacattcttgtaaaagaagcacaaaatgtgaaagcttgctcaaatagatatcaaggccaggtggctcacacctgtaatcccagcactttgggaggctgaggcaggaggatcacttgatttcaggagtttgagaccagcctaacatggcaaaaccgcacctctactaaaaatgcaaaattagctgggtgtggtggcaggcacctgtaatctcagttactcaggaggctgaggcaggagaatcgctagaacccgggaggtggagattgcagtgagccgagatcgcagcattgcactccatccagctgggcaacagagcaagactctgtct

SEQ ID NO: 128 - DNA, 2959 bp, Homo sapiens
tttttttttttttttttttttttttcttgtatacaaatgtttgtagcaactttattcataataatcccacgctggaaataacacaaatattcatcagcaaatacataaaccaactgtggtatattacaatgaaatactattcagcaatgaaaacaaaaagctacagacacaggcaacagcaaatatctctaaacatgttaagctaaagaaactaaacacaagagtatatactatctgatttaatttatatgaaattctaaatcagggaagaaaactaaccttccagtaacagaaggtggatcagtggtgacctagggctggggagaatgactgcaaacggagaggaaatttattctggtaagaaaatgttctttactttgattgggggtggtggttacatgggtgtacacgttcatcaaagatcattgaactctacagtaaaaatggctacacttaattatagtaaattataatttcattaagttgatcagaaagaaaaaacgtcccaatgaagcgacagacaaaagtcaccacaccagtgtctgtcttaatatttgaatatgcactaaatttctaggtttctatttgtttcataccacatgtcaggggggcaagtttacatctaaataaatggcttaatgagttaaattataatagaggaagatatttttatatatatatacttttttatttttagagatagggtcttgctctgtcacccagcgtggagtgcagtagtgcaattatagctcattgcagcctaaaagaggaagatataacaaaattattcaagaaatgaataaaagcctatggtatgagtgctttccaactgagtgattaacttttgatatgctattttgtctttgtttgaatcgtgagttgtgaagtgtttagaaaaatctgtcaagtacacaagtctgcttttttggtagttggatcaaaatattaaatctcttatcaaatgtttaagaaaatgtgattaataaaatatgtaaatggtgttaaatgttcaggataattggaatttacaaattgttaaagaaatgggaatgtaatttctcatttttatcaaatttactgttcttatatcttcaagttgagcttagagatttaaaaatgctgtattttaaatgtattttaataaagcaaatattaaaacaagtatttataagtatttttcttcccataccaaaagcctgctttgacagtaaagcttgttgacacatggttcaaacacttccttcctgcctttaaaaaatttattctgcttttcaaggaaggtatgtttctattttatctacaaaccttgtagactggccttatggttttagcaatataaaaacacacaaagtgatgcattttttaaatgaaattatttaacaacacaatgtattttaccactcttacaaagataacttacagtaaataatgttaacgatgttagttttacttatacgatttttctgtgtaccctctatctctacttcacctcaatgtctttcaccctccaattttaaggtgaaaatatctaggcttctgccctctgcaactgatttctattgagggcctatggaggtaaaatgacaataatcattgaatctagaaagaaaaagcatcaagcacaatttacatgaacaatagtttcagttgacatttaactgaatgcttctaacttatttaatcttattagataggcagtgttttaatcaatttacagatggagaaaccagggatggtgcaacttgcaagtggcagagccctgtttatctccaaagttcctgttcctctgagatgaagttatagattaacctaagtttgtcctttcttgatgtaaccaactaatatctttgaggatcttttttcttttacccagagtgctgtgttaagtgctgagtatacagattcattcaaccctctaaccagtccttgtagtactgattcatctgtggtcaaaatctggggtactggtgggttttgtttccaaagggttatgactttgagtgactaaaaaaagatagtttatccttgatgtagggaccatctttgatttctcattacttccccttttgacccctccaaagcacttagcaaatgtcagctaatgaataaatgataaaaaaatggttggccaaaaagacagcatcagaagagaatttttacctagtgcagtgcttagcacctatcagggatttattaaacatatatggaagagaatgacatttctgccattttattaataaattcaacaaagtatttattgaactttaaccatggcttgggcatttgttaaggatgagtggtttaatacaatgatgattcagacacggtctctacttccaaggaatctggcatctcaaataggtaagacacacataaaagtaataggtgatagcagtaagtgctgaaataagactgtcattcaagtgttgtgaatttgaagaagttgggaagatcaggaatgcaaatttcttcccccttgtcttagtccatttgtactgccttaacaaagtatcttcaactgggtaatctataaataatagaaatttattttcttacagctctggaggctgggaagtcacggttaagcaccagttggtttggtgtctgctgagtccccagttgctgctttcaagatggtaccttgttgctgggtcctcacgttagaagggacagaaggggctgggcatggtggctcacacctataatcccagcactttgggaggccgaggcaggcagatcatgaggtcaggagatcaagaccatcctggctaacacggtgaaaccccatctctactaaaaatataaaaaattagccgggcgtggtggtggcgggcacctgtagtcccagctactcgggaggctgaggcaggagaatggcgtgaacccgggaggtggagcttgcagtgaacaagatcacgccactgcactccagcctggggcaacagagcaagactccatc

SEQ ID NO: 129 - DNA, 3846 bp, Homo sapiens
tttttttttttttttttttttttttttttaaaaagctttgaaattcaaatcaaggtatcgacatttttttcgtgatacacatagagttgattctaaacttgtaagaaggatcaagatatatttaccgtcagataagaataataaggcatttaccccattagttattagaagttacaaagctatgacagttaagtatggagaacgacatatagaaaagtgagggaaattaaaatgtaagagacaattccatgcataaatggatatttgatctataccagagacggtattgaaaatcactagataacagatgagctattcaacaaatgctgttgatctttaggaaaatctgttatcctttaggaaaaatgtaattgaatccatttcacattataaccagaaggaattttaagtaaattaaagaaaaggtgttaaagaagactatacagttcgagtcttcttaaacttatggtacgtaaaacttattaaacaacacacaaaaagcacaacccggaaaaaacaaggttttaaaatttgcttgtattaaatttaaaagttctgtttcttaaaatttgtttgaagaaatattttaatagttattctaatgcaactatgctgctgatgaactgcatggctgaaaatgttggcattttaatcttcatttttgaaacatattttcaatatcttatagttgttactccatttattctagtttccattgtttccaataagaaatctgctatgatctttatctctgttcctttgcatgtaatatatattttttattctgacttcacttaagatactggtgtatcttcactttatcactggttttaagtaatatgattatgacgttcattcgtatacttttctttctatttcttatttttcaggtttgctgattctttggagctgtgggtttattattttcttcaaatagagcattttccaccattataaaaatacctttctagtgcccccttttttctccttatcttctaagactccaaataaacctatatttagctacttgcaattactctatctttcactgatggcctgtttatttattattttgatagtctctttttgttgaggtctcagtttagtttctattactatatattcacactcactaatattttattctgtaacctctaatgccattaagctaatccaatctaatttttaatctcaaatattgtagtgttcctttctagaagttctatgtgcatctctgaaatatttttcatttctctactgaacatgttcaatctttttctagctacttaaacatatggaacatatttacaatatctatcttaatgcttttgcctactaattctctcaggtgtatccttttttgattactattgattgaccgatttttttcttcaatacgagctttgtcatttctctgcttatttgacaacctattaatttctgatgtgatgcagatttgaaaaatgtttaccttgctgtgtgctgaatagatttgcatgactataaattttcttgatctttgtttgggacttgcttaagctacttggaaacagcgtagttttcggtttttttgttttgttttgttttgttttgttttgtcttgtttctttattactttttagcaggaatagagctgtatttagtctaggtttaaatttttctcactactgagcaagaccctccttagtaatctaaccaatgactactgagttctggctattgggaacagatattatttccaatcttgtgggtatcttggttactaatccttttaggtggttctttcttcattcttggataatttcctcatgagcatgtgctgatgagtactcaactgaatacttgtggggcgggaggaaccttatgcagatctgtggaattatctttatgtgcagctgtgtcttctctggtaatctgccctgcaaactcactatctggccctgaccagaaccccattttgtcttctcggttaggacgattgctgaacttttccaggaagctccctctctgtgctgcaacccagaaattttctctgtacagtacaccggtcggtcaaaagcctttccttgttggtttctcttctctcatggagcaatgtccttctttattcaacatcttgagtgccagtatttcttaaattttatctctcattaggtgtttcaagtgggagagtaaatttagtccctgttattctatatgtactgggatttaaagtttgttgttatgccttgtcaatctcctttaataggaaatagtttcttaccttcttttgtcttttataacttgagtttttaatgtattggcaaattattgtgaaacatgtcctttcatttgaatgcatctgatatttcctcatggttacagcttaaaaattattttatcaagataccacaatggtgatgctatgtctttctcactgaattatattagaatgcatataatgatttcctctattatttggaatgttaactttgaacaattagtaaaatggttcctgacaagttatagctactattttatctttgtaattaataaatattttgcatggatataaattaagcctatggaaatatcctagttttcattagattttcaagtagatttatcattcattggtgattatttcttaaatcagtgattactattgctttttaacattatgatttcttcatttattgcttggaaagtgggtataagaaagaggtttcccttatttctttctttatataaatttttattaataaagttatgactttatgtatgtaagtgagatttggctcaaggattctttacaattggttataacttgttattataattacttattttaatatgcaaatcatttcatgtttggagattaggaatcccttcaagctgactgccattcatttttcatgtttccaatattcttagatcacttgcttactttctggcatggcgagattttcaggtttattttacatttattttctcagctctaacactagaggcagcattttctccaaggaaccctggttccatttagcaaagagtagcagttggaaaaattatctggtgctacctgttttcattgctactaggtccttttagtgggtacatttaggaattatagatgagtagagatagatagatatgcatattatatatgcacatacatccatatcttctatttctatctatgtatttattcaattgtcatgtatgttttttccatttgctcttactatggagcctcttatctttacagaggttttcaaaagtttatggattttgcctttgtccaaggaagtaattttattcttcttaaaatattttctgtgttgttctaggttttttggggctgcaacaacttgcccgatcctggaaaccactaaattggcgtcatcattgtctagtgctatctttattatctttttcttttttaccctgctgtgcaatagatctcaaaacttacgtctgtctatttgaaactgcacccttcaaccaaccaatctccccttctctttctctctgtaacgccctaccccagcctctggtaaccaccattttactctctacttttaagagtttaggctgggcgcggtggctgacgcctgtaatcccagcactttaggaggccaaggcgggcggatcatgaggtcaggagatcgagaccatcctggctaacacagtgaaaccccgtctctactaaaaatacaaaaaattagccaggagaggtggtgggcgcctgtaatcccagctactcggaggctgaggcaggagaatggtgtgaacccgggggcggagcctgcagtgagccgagatcttgccactgcactccagcctgggcaacagcgagactccgtc

SEQ ID NO: 130 - DNA, 615 bp, Homo sapiens
aggcggccagcggcggagaggcggacagcacagcggcggcgcgcggagagacggacagcggcggagaggcagacagcggcagcgcggcggagaggcggccagcggcggagaggcggacagcggcggagaggcggacagcggcggcgcggcggagagatggacagcggcggagaggcagacagcggcggcgaggcgcgcagcggcggcgcaggcgcggagaggcgctggcgccggctctggcgcggagaggcgcaggcccaggctccactccccagctgtgaaagggttttctgcctcctgctaagccaatttatacattccaagaaaatcttccatttcatccaggtgaaacagaacctactggaatgaagctggcctcccatggaatgaagctggcctcccgtctccttgatttgaagcagcttctgcacgttggttattatgccatttttctaaatctaacattttaaaatttgtgccttttctttctcttttgcttgacttctcagaggtttttttaacggtcttttcaaagaagtggttttgggttttatttatcaagtctacttttattatggctgttttaaaattaaatacatttatttcttgtttccc

SEQ ID NO: 131 - DNA, 5577 bp, Homo sapiens
ttttttttttttgtttttttttttttttagaggataggatcccttgaagccaggagtttgagacaagcctgggcaacaaagcaagaccctatctctaaaaaaaaaaaaaaaaaaaaaaaaaaaaaaaaaaaaaaaaaaaaaaatctaggagatgctctttaccctgcctggcctcaaactattaatagcttcctttgagcaacattatttattatgaactttcaaacacaaaaaagtagagagagtagaataacaaatccccatgagcccatcacccaacttcagtaattatcaattcatggccatcttgttcacccctgcctgcttccctgcttcccctcattctgcagaggttcttttcttttgagacagagtgttgctctgttgcccaggctggagtgcagtggtgcaacttcggctcactgcaacctccgcctcccaggttcaagtgattctcctgcttcagcctctcaagtagctgggattacagatgcccgccaccacacctggctaattttcgtatttttgttagagatggggtttcaccatgttggccaggctggtctcgaactcctgacctcaagtgatccgcccgccttggcctcccaaaatgctgggattacaggtgtgaaccacggtgcctggccactgtacaggttatttatagaagttggagagtgaagggttgagaaagccaaggggcagatgcgggtctggaggattttgtgcctaaggccctctctttgctcccagacagcatgaagtaacaatgaggcatccacctcttggttttgtggcctctgtggatgacgtctctcaccttgaaccagttcagagttggagtagcgcaggatcctgtcttcagaggaggggccgaagcgggttcctctgttgtcaagctctttggaggtgcctggctgctactactgtcccagagaggtgatgatgaatgatgggtgtgtccagtggcagtttgccccactgaggcaggggcttccactaggccctgacagagcccttccagcaggcagaaatccctgtgctaggcaagattcaaactccgtagcatgtctcctgctcccatctcttaggaatggagtccttcaggccttgagtcccacattttccatgatgctccattaagcagctgatagcacccccacctccagggaaagtgagttcagagtccttggtctaatgcatctgtgttgaaattgaggccttcccctgtgttcacctttctgctctttttcttttagcccaaggctatgaaggcctcattcggtgctgggcatggtcactcctagcattcctcactctgttgctaacagcaacagcaataataataagggttacaacttactccataccttactgtctgccaggcattaagctaagtgctttacatatattaagtcatttaatcctcataatgaccctatgaaagagataccatctcaacccaattgacagctggtttgcaagattaggagggatgaaggacccaggggacaatgcgagggaaaactctgaccccggggccccaggctggatgttctttatgcctgtgaaccacagcttatcacatgtctggagttagggaccccacttaaagtgagattttggctggaggtggtggatcgtacctgtaatcccagcactttgggagaccaaggcggaaggactgcttgaggccaggagttcaaaaccagtgtaggtaacagctagaccctatctctacaaaaaatttaaaaattagctgggtgtggtggtatgtgcctcaagttccagctactcaggaggctgaggtgggaggatcacttgagcacaggagtttgaagttgcagtgagctatgatggcaccactgcacttcagcctaggcaacagagggagaccctgtctttaaagtacatagaggtttttcacaccaacacatctctgcccagtgtgccaacatctgccacctgctataatagtactataacactcaatatgtaattaatgtagtctcagggatgttatgacaatatgattacaactatcacgtgtgtgcccagccaggctcaatgccccaggctgggcgaggtggggcaggggacacagcctaaaatgccaggcctcaggaagccatttggtttagcagacattgtttattaaaggagttacctatgccagatcgaaggcctaagatgattaagacactatgagtgccttcaagtggttggggacgttcatgattgtggtacagacaaataggctttcacatcattcttttatgtaatcatacaacagatatttgcacctacatgtgcagagcactgtgataggcctcagtgacacagaataatacggcaaagaccccacccgatgagccccctcccaccacccaccagtacagtagggggtggtttaatggagtgttcctggaatatgaagtgggggcaggcattaggggtggcaaagggacaagtgtttatctgatcagttatgtactgtttataataagtaaatcagcagagggggaataatacttagaacctatagagagtaaatctgacaagatgaaatgctgatgaaaatatggaggaaatgaaactctcatgggttttgcagggaatctaagtcagtgctgtgttgtgaatgtaggtgtaccctttgaattcatatgttgaatcctaacccccaaagcaatggcattaagaggtggggcctttggggctgggtatggtggctcatgactgtaatcccagcactttgggatgctggcagggggcagatcacttgaagccaggagtctgagatcagcctggccaacatggtgaaaccccatctgtactaaaaatacaaaaattagccaggtgtgatggcgtacatctgtaatttcagccactcgggaggctgagacaggagaatagcttgaacccagtaggtggagatttcagtgagccgagatcgtgccactgcactccagcctgggtgacagagcgagactccatctcaaaaaaataataaagatgtggggcctgtgggaggtggttaggtcatgagggtggagatcatgaatggggttagcaccttataaaacaggcttgagggagcccttctgtcccttctaccatgtgtggatgcagtgagaaggcaccgtatctctgaagcagagagcccgccctggacactggatctgctggcaccttgatcttggacttcccagcctctagaactgtgagaaataattttttgttgtttacaaattacccaggctaaggtgtttcattgtaacctgaatggaccaagctggtgtgaccctgttggaaaactggcagtatctaccaaagccgaacatacgtataaactgatccagcagttccactcctgggtatgtacaccacagaaagctatgtccaccgagacattggcaagaatgtttctaaccacacgctgactgtagccccaaacctgaaacaacccaaatgtccatccaccaacccaaatgtccatccacagttgaagctacagtgaagtcacagggtcgaatactactgcacagcaacgaatatgaatgaaaatatcgctatgcacagcaacatggataaatttcacagacatgaggtcaagcaaaagaggtcagagtcctcatcatcaagagagaattcattgtatgattctcttcctacaaaaagtacagaaataagcaaaactgatccatggtgttagaagccaggggaacagttaacaggggagggatactggggaggggcatcctggagtgctggtctacctcatctgggtgttgatttcacgagtattgtcagtttgtttccagactccctgttggagatgtggaaataaaaaccacctaaacaagagcagagaggccatttggtcaaagtttgcaaaggagtcagccatgattgcttgtatttggcaggggtcaaaggcaggcagggactgtgaaatgttatagtggaaaaaaagggaaggctctgggtgtgctgtgattggagattgttggcatggggacagagcggactaactggaggggcatctttggttggttgggggggtatatttggctttctctggttggtctggagttggaagagggggtgtggtggctggggattgggaagaagctggcagccactaagttcagactgttctgggtccgattgctgctgaggctgtggtttggcttccttggcttcccaggctggtcatgggtttctggccagagtctattgtcatatgtggcctggccattgtccagttgtatgttcagtctcttggaaggaagggtattgactctgagaggggccaccatcgctggaatgggggacacacagtacttcctccagctgcctacacccccctagggtcagtggcgcctgcctgtgagggtgagcccaatggctagagggctctgctccaagtcattgcttactacacccacaaacattcttcgttctttaaggcctaacttaaagcccagatcctacaggaaaccttgattagacccctctctttattaagcttcctaagatcaaaccctgcttttgtgtaaatgctgacctccttgcctacattttaaaaacctagagctgggcatgatggccccagcctgtaatcccagtgattcaggagactgaggtgggaggattgctagaagccaggagttcgagaccagcctgggtaacatagctagaccacatctcttaaaataaaatagttaatttagccaggcatgatgatatatgcctgtagtcccaactacttggaaggctgaggtgtgaggatctttgagcccgggaggtcgaggctacagtaagctatgatctcaccactgtactccagcctgggtgacagagcgagacccagactcaaaaaataaaaataaaaaccctgaatatcttccttctacttcttcagtgctgtttttatttaaaaaaaaaaaaaccagccaaaaccacaactttttactgaagtgtaatgtaaatgctgtaaaaggcagtgaaaggcacaagggaggtggaggggtaggaagggtggaagtggcgggaggaagtggcagggcaggcaaaatgaagggaagccctgggttcttgtcctgcatccgcagccagctcccactttcctcaccctccaggacctgtaaactgtgaggctggaccagttatgtcaaatctgtcctcccccagagctcagtccctctgcccttgggtgtccttggcacaaggcaggctaggctgcaccagcttcctccatctccgtcctgcctcccccatccccaggtgccattcccacaccatctgaatcactgatttcctcgcaatcagacgctatcttccagttaatcacttcgcttgtatttaacataagaaagaaaaaccctttcattatcacatacagctggaaatcggcttcttgcaggaggcgtatccaaaggaattggagaagagataaactggtaattggtgaaagaattactttaattttttttcctacttgctgtcatgatgatgtccttagaattgtgagcccgtggacacttctgtacaataaatctgctatattacttc

SEQ ID NO: 132 - DNA, 5121 bp, Homo sapiens
agcaagggtatctgcatattagccctctccaccttctttcccgctgaatcattccctcaagcccagagctgtcactgcttctttctccctgggaagaatgcgtggactctgcctggtgatagactgaagccagaacagtgccacaccctcgccttaattccttgctaggtgttctcagatttatgagacttcttagtcaaatatgagggaggttggatgtggtggcttgtgcctgtaatcccagcattttgggaggccgaggtgggaggatcccttgaggccaggagtttgagacaagcctgggcaacaaagcaggaccctatctctaaaaaaaaaaaaaaaaaaaaaaaaaaaaaaaaaaaaaaaatctaggagatgctctttaccctgcctggcctcaaactattaatagcttcctttgagcaacattatttattatgaactttcaaacacaaaaaagtagagagagtagaataacaaatccccatgagcccatcacccaacttcagtaattatcaattcatggccatcttgttcacccctgcctgcttccctgcttcccctcattctgcagaggttcttttcttttgagacagagtgttgctctgttgcccaggctggagtgcagtggtgcaacttcggctcactgcagcctccgcctcccaggttcaagtgattctcctgcttcggcctctcaagtagctgggattacagatgcccgccaccacacctggctaattttcgtattttgttagagatggggtttcaccatgttggccaggctggtctcgaactcctgacctcaagtgatccgcccgccttggcctcccaaaatgctgggattacaggtgtgaaccacggtgcctggccactgtacaggttatttatagaagttggagagtgaagggttgagaaagccaaggggcagatgcgggtctggaggattttgtgcctaaggccctctctttgctcccagacagcatgaagtaacaatgaggcatccacctcttggttttgtggcctctgtggatgacgtctctcaccttgaaccagttcagagttggagtagcgcaggatcctgtcttcagaggaggggccgaagcgggttcctctgttgtcaagctctttggaggtgcctggctgctactactgtcccagagaggtgatgatgaatgatgggtgtgtccagtggcagtttgccccactgaggcaggggcttccactaggccctgacagagcccttccagcaggcagaaatccctgtgctaggcaagattcaaactccgtagcatgtctcctgctcccatctcttaggaatggagtccttcaggccttgagtcccacattttccatgatgctccattaagcagctgatagcacccccacctccagggaaagtgagttcagagtccttggtctaatgcatctgtgttgaaattgaggccttcccctgtgttcacctttctgctctttttcttttagcccaaggctatgaaggcctcattcggtgctgggcatggtcactcctagcattcctcactctgttgctaacagcaacagcaataataataagggttacaacttactccataccttactgtctgccaggcattaagctaagtgctttacatatattaagtcatttaatcctcataatgaccctatgaaagagataccatctcaacccaattgacagctggtttgcaagattaggagggatgaaggacccaggggacaatgcgagggaaaactctgaccccggggccccaggctggatgttctttatgcctgtgaaccacagcttatcacatgtctggagttagggaccccacttaaagtgagattttggctggaggtggtggatcatacctataatcccagcactttgggagaccaaggcggaaggactgcttgaggccaggagttcaaaaccagtgtaggtaacagctagaccctatctctacggaaaatttaaaaattagctgggtgtggtggtatgtgcctcaagttccagctactcggaggctgaggtgggaggatcacttgagcacaggagtttgaagttacagtgagctatgatggcaccactgcacttcagcctaggcaacagagggagaccctgtctttaaagtacatagaggtttttcacaccaacacatctctgcccagtgtgccaacatctgccacctgctataatagtactataacactcaatatgtaattaatgtagtctcagggatgttatgacaatatgattacaactatcacgtgtgtgcccagccaggctcaatgccccaggctgggcgaggtggggcaggggacacagcctaaaatgccaggcctcaggaagccatttggtttagcagacattgtttattaaaggagttacctatgccagatcgaaggcctaagatgattaagacactatgagtgccttcaagtggttggggacgttcatgattgtggtacagacaaataggctttcacatcattcttttatgtaatcatacaacagatatttgcacctacatgtgcagagcactgtgataggcctcagtgacacagaataatacggcaaagaccccacccgatgagccccctcccaccacccaccagtacagtagggggtggtttaatggagtgttcctggaatatgaagtgggggcaggcattaggggtggcaaagggacaagtgtttatctgatcagttatgtactgtttataataagtaaatcagcagagggggaataatacttagaacctatagagagtaaatctgacaagatgaaatgctgatgaaaatatggaggaaatgaaactctcatgggttttgcagggaatctaagtcagtgctgtgttgtgaatgtaggtgtaccctttgaattcatatgttgaatcctaacccccaaagcaatggcattaagaggtggggcctttggggctgggtatggtggctcatgactgtaatcccagcactttgggatgctggcagggggcagatcacttgaagccaggagtctgagatcagcctggccagcatggtgaaaccccatctgtactggaaatacaaaaattagccaggtgtgatggcgtacatctgtagtttcagccactcgggaggctgagacaggagaatggcttgagcccagtaggtggagatttcagtgagccgagatcgtgccactgcactccagcctgggtgacagagcgagactccatctcaaaaaaataataaagatgtggggcctgtgggaggtggttaggtcatgagggtggagatcatgaatggggttagcaccttataaaacaggcttgagggagcccttctgtcccttctaccatgtgtggatgcagtgagaaggcaccgtatctctgaagcagagagcccgccctggacactggatctgctggcaccttgatcttggacttcccagcctctagaactgtgagaaataattttttgttgtttacaaattacccaggctaaggtgtttcattgtaacctgaatggaccaagctggtgtgaccctgttggaaaactggcagtatctaccaaaagccgaacatacgtataaactgatccagcagttccactcctgggtatgtacaccacagaaagctatgtccaccgagacattggcaagaatgtttctaaccacacgctgactgtagccccaaacctgaaacaacccaaatgtccatccaccaacccaaatgtccatccacagttgaagctacagtgaagtcacagggtcgaatactactgcacagcaacgaatatgaatgaaaatatcgctatgcacagcaacatggataaatttcacagacatgaggtcaagcaaaagaggtcagagtcctcatcatcaagagagaattcattgtatgattctcttcctacaaaaagtacagaaataagcaaaactgatccatggtgttagaagccaggggaacagttaacaggggagggatactggggaggggcatcctggagtgctggtctacctcatctgggtgttgatttcacgagtattgtcagtttgtttccagactccctgttggagatgtggaaataaaaaccacctaaacaagagcagagaggccatttggtcaaagtttgcaaaggagtcagccatgattgcttgtatttggcaggggtcaaaggcaggcagggactgtgaaatgttatagtggaaaaaaagggaaggctctgggtgtgctgtgattggagattgttggcatggggacagagcggactaactggaggggcatctttggttggttgggggggtatatttggctttctctggttggtctggagttggaagagggggtgtggtggctggggattgggaagaagctggcagccactaagttcagactgttctgggtccgattgctgctgaggctgtggtttggcttccttggcttcccaggctggtcatgggtttctggccagagtctattgtcatatgtggcctggccattgtccagttgtatgttcagtctcttggaaggaagggtattgactctgagaggggccaccatcgctggaatgggggacacacagtacttcctccagctgcctacacccccctagggtcagtggcgcctgcctgtgagggtgagcccaatggctagagggctctgctccaagtcattgcttactacacccacaaacattcttcgttctttaaggcctaacttaaagcccagatcctacaggaaaccttgattagacccctctctttattaagcttcctaagatcaaaccctgcttttgtgtaaatgctgacctccttgcctacatttaaaaacctagagctgggcatgatggccccagcctgtaatcccagtgattcaggagactgaggtgggaggattgctagaagccaggagttcgagaccagcctgggtaacatagctagaccacatctcttaaaataaaatagttaatttagccaggcatgatgatatatgcctgtagtcccaactacttggaaggctgaggtgtgaggatctttgagcccgggaggtcgaggctacagtgagctatgatctcaccactgtactccagcctgggtgacagagcgagaccagactcaaaaataaaaataaaaccct

SEQ ID NO: 133 - DNA, 3739 bp, Homo sapiens
ttctttttttttttttttgagacagagttttgctcttttgctcaggctggagtgcagtggcgcgatcttggttcaccgcaacctccgcctcctgggttcaagcgtttctcctgcctcagcctcccaagtagctgggattataggcatgtgccaccatggctaattttgtatttttagtagagacggggtttctccatgttggtgaggctggtttttaactcccgaactcaggtgattgcctgcctcggtctcccaaaaagtgccgggattacaggcgtgagccattgtgcccagccaaaagtttctttttcaagagatggtggtcttgccatgttgtccagtatggacttgaactactcagctcaagcagtcctcccacctcagcctcctgaatagctgagactacaggcatgcaccactacacctggctgcgagatgaaattttaagagatgggggtcttgttctgtcgcccaggctggagtgcagtgacatgatcaagccgtgatctcctgggctcaagcaatcctcctacctcagcctcctgagtagctggaactacaggaatgcaacaccatgcccagctaattttgatttttagtagagatgcggtcttcctttgttgcccaagctggtctcaaactccagggcttcctgagtagctgagactacaggtgtgagccaccatgcccagcctcctctcttttccaatattgtgttaagtaaattgtattggtggtaatcaacttgatcatttcatttttaggatagagatatcaaggtgagggtataactgaacgagaagaggaataaacaccaccctgtgattgatggatctttatagctctcctttgataaagaagggaaatatcgtacttacattagcatgttatagttgctgttgttatacagaagaatattaaacaatattcatatattgtttatgaatgcattgaattcataaacaatggtatggatattgactagccaaagaggtggataaatgtagatacaatgatacggtgatttggtattcagtgtccattctgctctcctagtgtgccttcctataatgcaggggctggaaggtgagaaaataaccacatttcccagactccctttgcaggtagatttccagatgtgaattgggttccactgatcagacacccatgtgtgagatttggaatgcagaactgaggagagagccatcttcctcttgcttgtgttctggtggcatgtgtggttgaggagacatttaatttccctgcagcagaattcttgcagtcagttgttgaggcaagtggcgtggtggatgcaaccctgattcttcacctttctcattattgtggggtagcagcgcctctggcaagccagacagacctgcagtgtttttctgggagttaattctggagacccagtatggaacccactcctagcccttgtgacaatattgcaagcatccagttccctgttttacagtccttttaaatgtggctagctacagtagtttgtgtttcctgcaactaatcactcatacatctgtatctaaagcactccacctgggtcatgtactatacttaaaattataaggcaatattaattcacaaaactacctactcgttttatttaaccctcagaagaactgaaaacaaaagctataccaggcttgctctagagcgtgggcttgggaatggaaaggcagagtgcacctattgaattccatcatcagtttttctataccatggagttacttaccatgtgtatacataacactgattaaaaatttaaaaaaaaggttaaaacaaaaactgagccagattctgacatttaaatcagaattattcttagtacatagacttgcaaagtcactgaataattccttgggactacagactcttagtctttgcttctagaaatgtatagtaatttcaacatgtcatatatatggagagagtatatatgtgtatatatatacacacacacacactatatagagtatatatatacactccatatacagtatatactagtgtgtatatatatatacactagagtatacacactctagagtatacactctataaagtatatatattatatatactatatattatatatactatatactctacagtatatatatacactatagagtgtatatatatactatacagatatgtatagagtatatatactctatatatacactatagtctatatactctagagagtacagtatatatatatagtgtatatatactctatggagtgtatatatattctctttctctccatatatatatatatagtaatcagcttcctcaggttgaaacatctagatatattgaaaacactggatagtctgcaactcctcttccttagagaatgtatattatctttagtattaaagtgactcttgtaagtcctgagaaacacctcggaacactgcattcacgtgtttgctaggcagaatagtacccaccctgcaagacatcacatcctaatgcccagaacctgtgaatgtgttaggttacatagcaaggggaaattaagatggctaatcaggtgaccttaaaatagggagatcatcttggattatctgcatgggtccaatataattagaaagaacctttaaagtggaagagggaggcagaagagagccagaggaagatgtgactacagaagaaggcacggatgcagcattgctggctttgcagatgagggaaggaggccttcagccaaggactgtgggtggctctagaatctttttttacatctcagtatgtatgccacagttaaggtttttgtttttttatttttgagatggagtttcgctctgtcatccatgctggagtgcaatggtgagatctcgactcactgcaacttccgccgccggggttcaagcgattctcctgtctcagcctgagtaactgagattacaggtgcgtgccatcatgcccggctaatttttgtatttttagtagagacgaggtttcaccatattgatcaggctggtctcgaactcctgacctcaggtgatccgcccacctcggcctcccaaggtgctgggattacaggtgtgagccactgtgcccagcctcacagttaaggtttttaaacaatctgatttaactgaataaaaaatgctcgcttgtgtggcgacatggtttttaaaaatgtaaacagagctgggcatggtggctcacatctgtaatctcagcactttgggaggccaaggcaagagaactgttgaaggtcaggagttggagaccaaccagcccagggaatatatggggagaccctatctcttaaaaaaaaaaaaaattacctgggcatggtggcatatgcctgtggttccagctactcaggaggctgaggcagtaggattgcttgagcccaggagtttgaggctgcactgagccgtgatcacaccactgcattccagactaggtacagagcgagtctatgtggagtgcaatgtctctaaaaaaaaaaaaatacccaaaatataaacagggactatgaggtatgtacaggaaattaatagctgaagaatattttaccatgttcaaaaactaaattcttcatgtggctgagagaagaaagaaaaaaatggtatgtttgtgttccatttgcaggtattacataaacccattttaaatgaactaaaatgcctaggatttggggggaaaaattatcttgtgctcgcatttgaaggttcttctcagaaataaactgttt

SEQ ID NO: 134 - DNA, 2730 bp, Homo sapiens
agtactttttttttttttttttttttttttttttcgagatagggtcttgctctatcacccaggctggagtgcagcggtacgatctttgctcaccactacctccgcctcctgggttcaagcaattctcctgcctcagcctcccgagtagctaggattacaggtgtgcgccaccatgcccggctagtttttgcatttttagtagagacagggtttcaccaggttggccaggcttggtggctcaggcctgtaatcccagcactttgggaggcccaggcaggcggatcacttgaggtcaggagttcgagaccagcctggccaacctggtgaaaccctgtctctactaaaaatgcaaaaactagccgggcatggtggcgcacacctgtaatcctagctactcgggaggctgaggcaggagaattgcttgaacccaggaggcggaggtagtggtgagcaaagatcgtaccgctgcactccagcctgggtgatagagcaagaccctatctcaaaaaaaaaaaaaaaaaaaaaaaagaagccaaaaggccctgcagcaaatcagcaatagacccagcagccaatcctgttttaacatcgaatgtttaacactcaacttcagaccttgaatgattgactgaaaatggaagctcccatgttggggttactcaaggtccttattggttcttcagcattttgtggctataaatatttttaaataacagttgtattgagatataattcacagaccataaaattcacccaactaaagtatacattttaaaagtttttaggccgggcacggtggcttacgcctgtaattccaacactttgggaggctgaggcgggcggatcgcctgaggtcaggagttcgagaccagtctggccagcatgatgaaaccccgtctctgctaaggatacaaaaattagccgggcatggtggtgcacgcctgtagtcccagctacttgggaggctgaggcaggagaatcacttgaacctgggaggcggaggttgcagtgagtcaagatcatgccattgcactccagcctgggtgacagagtgagatcctgtctcaaaaaaaaaaaaaaaaaaaatttttttagtatatccacagagttgtgcaaccatcaattttagaacattttcatcacaaattttgtgcctgtaatagtttcctagagctgtttcttaacgaagtaccacaagctgggtggcttaagacaacagaaatgtattcctggccgggtgcagtggctcacgcctgtaatcccaacactttaggaggccgaggtgggcagatcacgacgtcaggagatcaagaccatcctggccaacatggtgaagcccctttctactaaaaatacaaaaattagccaggtgtattggcgcacgcctatagtcccaactactcaggaggctgaggcagaagaatctctcgaacccgggaggtggaggttgcagtgagccaggatcgtgccactgcactctagcctgggtgacagagcaagactccatctcaaaaaataagaagaaaagactgtatcccctttcagttctggaggctagaagtccaaacaggttgttggtggggcttctgcttcctctaaaagctttagggcaggggcccccagccccagagccacagaccattacttgtctgtggcctgtcaggaacaaggtcacacagcaggagataagtaacaggtgagcacttgaagtttcatctgtatttatggctgccccccatcgctcacatttctgccgtagctcctcctcctgtcataccagcagtggcattagattctcataggagcgtgaatcctattgtgaactgtgcatgcaagggatctaggttgcacactccttatgagaatataatgcctgatgatctgtcagtgtcttccataacccccatatgggactgtctagttgcaggaaaacaagctcagggctcctactgattctaccttatggtgagttgtataattatttcatcatgtattacgatgtaataataatagaaatacagtgcacagtaaatgtaattcacttcagtcatcccgaaactatccccctatccccaccccggatctgtggaaaaattatcttccatgaaaccagtccctggtgccaaaaaggttggggactgctgctctaaggaagactttttcgtgccttggggactgctgctctgaagaagactctttcatgcttcctccttagcttctgatggctcctggcagtccttggcttgtggctgcatcacttcagtttctccctccgtcttcacatggccttctgtgtctgtgtctcgcatggccttcttccctgtgtctgtgtctttccatggcctacttataaggaccccagtaattggatttagggcctgccctaatccagtctgatttcatcttaactaactagatctgcaaagactctatttccaactaaagtcacattctgaggtttcaggtagacatgaagttttgggggacaccactcaacccattgcagaacccattagcagtcacttcccgttcctcaacgccccctaccccagggcaatcagtaatctactttctgtctgtttggatttgtctattctgaacatttcatataaatggaatcatagaatatgtggtcttttgtgactggcttctttcacttaacatgttttcaagatttatgttgtagcatgaatcagtactttattactatttggaataaaaatcagttgt

SEQ ID NO: 135 - DNA, 5612 bp, Homo sapiens
gttttttttttattttttttcttttttttaccattagaaaagcttttattctaaaagaactataaatagtaacatcgatcgacatagaaacactcttcacaaaaggactcttgcattactgccttctgaccacgaccagcagacactgtggatgttaggactccacggtgtctcccgactcccaggattttaaggctaaatgtgcacttggaggaacaggggctgtaaggctatttcttccctttcttttaaaagacaaatttcatggtttcccattccaagataggcttcatagctggggaagatcttaagattcttggtctaaggggtaagcaaatatcttcctgagactgggaggtatgatcaggcacttgggaatctggctttgaatgtcatctctgaagcatggaagttagtggtgaaaaaaatcttatttccaagtctaggataagctacttctggaatggcttatcccaattcaagtaagtcacaggtgttatgttgtctgcatctatggatgtaactaaacagtcattagggtgcttggatgaagaagaaagacatccagtcttccattaggctcaactggtttcagctcaaagcagaactaatacttttaatggaatggctggagctctcatactgttactctaggaaaatctatcaattattgagtccagggcaggggggccaccagacatcacagactgtgtaaagaccatcagaaaggtgtcattgaggttgcggtatggtggcttacacctgtaatctcagcagggaggcgggagggttgcttgagcccaggcgtttaagaccagcctgggcaacatagcaagaccccatctcaaaaaaaaagcgggggggcagtgattgtacctaacaagggaagagaatctttcagatgaagggtcaacagaaaataaagaccctaaacacttctaaaagtagaacgcagttgaattttgcataactaatctgggaatggagtaaaagaaacaaggttacagaatgtagtgctttagggactttagaaattaggggcagtatgtatgagaatgtgtgctggacactggaggtgtcccaggagctttgaagcactaggtttggttcaatcccgacaaactcccagccatgtgcaagcactgcctcacggggtgcccagagccatgaattcttttcatctgagttggcatccggtcagctgagcatggaacatggggccaccccaaacgccgtacagcacaaccattaccaacactgtctattgctagagcacagcttcctgcatacataggacactgggcttctgactgcaagtttctcctttccaaaagccagctctaagacttgtctctcttctcatagtcactaagtcatttgcaaagccccagggtccatttcaaattctagagattctagtgagcatcaaggtttacaacccaatcgaggagaacaagatctgtggtgtgctccaccatgccatggttaagcaacgcagacagggcctgtgtctcaggagcaggcgccctctcggtgggccgccagaaccctcggcggactgaaagcaaaggcagcaaggctgggtggcaggcaacgtgggctcaggtgtactcggtttgcggatataattggagggaacgtagcccttcttcccgttaacctcagctaaccaccactctgtatttcctgtaacatctttaaactcgaggatcttgagtttctgattggctgacacgctcagctcatttgggtttcgtgccttgaaggtgtagacagcaaaatagacctggttgccttctgcctcactgccatctggctctgtacttctgtcttccggagcctgggctgttcttgcacatcctttgacgaggtcttgactttgcccatttcgtcctggtacggagtagccaactatttctggatgcctgaagttccggtagctcctcggcgtggcagtgggttgctttacatctctagctacatctgcagagtcccctgaccttggctgggaggtggagtctgggtctgaagggcatctggaaggactactctctgaattactcggatttagggatgcactgagagttccttggtcacattcttttggcggaggagatgcatcttgaggctgcttctggcaagacccgaggtaaaggatacagccatgctgctggggttgaaggtcagggtgctgccgctgttctggcgtgggaacctgggggaggagctgccgtgctcagactctgtggaggagtggctacccacggaggcatcggagtggctgcggcgaggattgtagggctttaggaaagagctgtacacgaagcctttggtgactacaaaggaaacaggaaatataaacaagaactcttagcagaaggctggacagacagagggagcattgagagaaaaaaaactgatctaggttattcatctgtaaaatgaagagtaaaacaaaaactcaaaagccaggccaatagtgagagacacaaaataaaatgcctagtgacaaagcggcttggaacactcagtcccaggatgtgatgtgtgtaggtagagatgaagagccgcagctgcctgccggttcattcatgttcacaacctcacaacagatgcatgctcaggaggcccatggccaactgagaagacagcaatgaaaacaatccatgtctgggaaccggcatgggaagagaatgtcataggacactgagatcatgcctaagaggaaggcttgattaagcctatgttcaaatacagcaagtgtggaaaagaccgagttaagaaccagcctcggcagcgcacgggagctcacgcctgtaatcctagctctttgggaagctgagatgagaggattgcttgagcccagttccctggtcaacacagcgagacttcatctctatttgaaacaaaacaaaacaaactgggtacagtggctcatacctgtaatccaggcactttgggtggctgaggagggcagatcaccagaggtcaggagttcacaaccagcctggccaacatggtgaagccccgtctctattaaaaatacgaaaatattagccggatgtggtggtgcgcacctgtaatcccagctactcaggaggctaaggcaggagaatcgcttgaacccaggagccagatgttgcagtgagccaagaccatgccattgcactccaacctgggcaacaagaacgaaactccgtctcaaaaaaaaagcctcagctcaagaagcccctccatagacctccctgccctctttcccaccaggacacgtgaatcctttgctctgagagtctggatatactggaaggatgttctaacgtaggaaactgtttgttagaatatacacgtaacgtgtactgcacatggttcactttaataaattgcccaagatgaccaagggggctttcagctaaaactcaagtataaattagggattgcgtgagcatccacgtgacaatttttcataacactgtcaaggcacagacccagagtatgtagcctccatgagaacaatggccattactctattgatctttgatgcatttcctgtacctgacagctgatctgaatactgtggcttcctgctaccacttctcaagtttgagtagataaaaactgaaggatggagcagtttcttaaacagcttgggactttaggtccatctgtctctgaccccagcagtagctgtcacctgatgtcaccctaacaggctccatcctctgtccttcgtgtcccacttttaatctctcgttctgtgtaagcagaagtggggagaaaaaaaatccacaagatgctttaaagaaaccaagaaatgtgacatttttcagttctgggtggtgaatacataatgtctgtctagatagggaccacaatccctacctaaaatgcttagggccagatatgttttggaattcagattctttttaattctgggaaggtagtcaagtacccatactacatattttgtaaaaccccccagcagggtcagcaccccgtaatcaattctgttaatgaatattcagaatgagatcctgtcatttgcggccacatggttgaacctggaggacacgttaagtgaaatgagccaggcgcagaaagacaaataccatataatctcattcacgtggaatctagacaagttgatctcatagaggttgagagtagaatgctagataccagaggctgggggtggtggaaggggaggtgagtctggggagaggttgctcaacaggtacaaagttaggagaaataagctctggtgttctattgcacagtaaggttactatagctaatgataatgtatatttcaagatggctagaagccaaggattctgaatgatatctctgcaaagaaatgacaagtttatagcctgggcaacacagggagactgtctctactaaaataaaattaactgggcatggtcacgcatgcctctggtcccagctactcaggaggccgagacaggaggattgcttgagcctgggaggtggaggctgcagtgagccaagattgtgcccctacaatccagcctgggtgacaaagctagaccctatctcaaaattatcgcaccgtaccccatagatatgaacaagtatgtgtcagttataaactaaaacttaaagtatctcacataattgcaaataggaaagttctgatgtttttgtgtcattcatgttggagatgtagtcatccacccatgatgtgagcaacctcttggctgaatcagattgcaatcaagcatttaaaaaaaataaggccaggtgccgtggctcatgcttgtaatcctggcactttggaaggtcaaggcgggatggaacacctgaggttaggagttggagaccagcctggtcaacatggtgaaaccccgtctctacaaaaaatacaaacagttagccaggtgtggtggtgcgtgctacttgtgaggctgaggcaggagaatcgcttgaaggcagaggttgcagtgagctgagatcgtgctgctgcactctagcctgggtgacagagctagaccctgtcttaaaaaataataaaaatgaaaaatacatacacatgactattcacaccaaaaggataagttacaattataaatagtctcacatcaccttcattcaggttttggcaaaagtgtttttagagctttttggattttggaaaaagggattacagatcagtattatcccttgtacacttacttaaattctgtaaatcactctccctccaaaaaagttgtaagctgtttttaaagtaattccctaaatagtcatgaggtaaaactgtcatggggagaagaaagcaaatgaaatcccacaggtttttaatttccacaagacaaattcatggaaactggaagaggtgctgggtgcggtggctcacacctataatcccagcattttaggaggtccaggcaggaggacggcttgagcctagaagttggagaccagcctggacaacatggcaagacgtaatatctataaaattattaaaaaattagctgggcatgatggcatacctgtagtcccagctaggacaggaggatcccttgaacccaggagtaataagctattattgtgccgacggcactccagcctggattaacagagcaagaccctgc

SEQ ID NO: 136 - DNA, 3433 bp, Homo sapiens
aagcagtggtatcaacgcagagtactttttttttttttttttttgagacggagtctcgctctgtcgcccaggctggagtgcagtggcgggatctcggctcactgcaagctccgcctcccgggttcacgccattctcctgcctcagcctcccaagtagctgggactacaggcgcccgccactacgcccggctaatttttttttgtatttttagtagagacggggtttcaccgttttagccgggatggtctcgatctcctgacctcgtgatccgcccgcctcggcctcccaagacaaagactcttaaaagcagcaagagaaaagtgaatggccacatacaaggggccctcagtaggattaatggctaaattctcatcagaaactgattctggaagttaattgaatgtttattcaaagtgatgagagataatactgtgagccaagaattctgtgtccagtacaactatcctccaaaattgaaggtgaaattaagacattacaagataaacagaaactgaaaaaatgtgtcactagcagacctgttgtacaacaaatactaaaggaatgctgtaggccaaaataaatgacactagagagtaactcaaatctgcataaagaaataacatcagtaaaggtaactaaataggtaaatataaaagacagtataaatgtatttttttgtttgcaaattttttcttctgtataatttataagacaattgtataaagcaataattataaatctatgttgatggtggtacaacacataaaggcaatttgtgtgacaataactgcacaaaggagggatgagggaacaaagttttatatactattgaaattaggttgatattaatctgagctagactgttataagttaaaatacaatactgtaatgaccagaacaacactaatacatgacttaaaaaaaagagtgaaagaaacaaggggattaaaatagcagactaaaaaatacctacttaacacaaaagaatgcaatgatttaaggatagagaaacaaaaaagacataggaaatggaaaacaaatagcaaaatggcatacataaatcacaccttatcagtaaatacattaaatgtaaatgtattaaatacttcatttaaaaggcagggatcctcagaatggataaaaattatctaaatatatggtgtctacaaaagacacgtttaaattcaaagaagcatataggttgaaagtaaaataatttaaaaatttataccatccaaacagtaaccaagagagctgagtgactacattaataacagacaaaaaggctttacgtaaaaacctgttacaaaatacaaataatggcattatatattaataaaaatgttaatttaccataagatataatgcttataaacatataactaaaatcaacctgaaaacagtgtcccacaacacatgaaacaaaaactgacaaaattgaaggaagatacaggcaaatcaataataatagttggagacttcaatgcctcaatttgaataggacaattgggaagaagatcagtatgggactaaactacttcatcaatgctaaaattcaactagatttaataggcatacacggaacactgcccaaaaaaatcagaataaaataagtctgaagtatggaatcccgtatgaaaagtggaatgagttgggactgagaataattagagagtagaaaataggaagccaagatgggtttaagcaaaaggaatttgtaaaaggcaaagtggttcacatgtttgtgtcttcagatcttgaagacatccagctgagttttctgacacaattttctttcatcaggatacaccccctacccccacttaatcacccaagtcataacctctccttcccccttacagataaaccctggtgtctaacacattctactttcatctctaccctcatcaagaggtaagcttgcaaaagtgttgagactttgaaagactgaagataaatagctcagagatatcaaatttggaagtatttaagagattactagccagttctaagaggatggcacctaaactggcagtccagaaactgccagtgtgttctaaataccctgacttgcatttaaagcataggtttgttttccattgcaatatagagattcagcactatccatgcctatgggtgcctcagaattttggtacaatggttaaatgctaagttttccctgtagaaccacatgtgtatagggaattaattctgccacttaacatatgtgtagtattgcacagcttaatctctttaagccttataatctttatttgtaataataataatgtctatctcattgtgatgttgtgagaattaaatgaaataatattgtaaactatttagctgagtgtcttttgtgtaaggagttaatatccttacccagattaaatgttcttcaaaggaactcagcctcattagacttgggatttagatctctgtccaggagaaatcattcttttaatttaggcaaatttttttctggagccttattgcaactggtcaagctatattagaaatgaagacctattgtactaaccgctccccaaggactcattcctccctgctaatgtagtccagggagcagaggcatgaaatagttaaataggaaaaattctgacttgctccacacaaggcaaatgcttattaacattacacaggaaatatcaagtcaccctgcttccagccaatggagcaaatccatttgtatgttagacctccctcggttgaccattttacaaaaagttgtcaaatataaaactagccttttattaccacagcaaaaaagcttagagaaaagcacaagctgaagctgaaaatatgaccttgactcaggaaaggaagtggcagatcacgagagaagagaacaatgtgaggccctaagaggattaacatagcctggaggaagacaaaaaatccagagtggaccagagctgggagtctttctttactctgtccagctagaaactttctaacatttcttagcaaggaagaactaaaattgattgtttttttaatggatacaagcttagattgtcaatggagagatctgtagctagttttcaacgtaaagcatggaagtcaatcttttaaaattaactgttattataaaatcctgagtttaagacccctccaggcattgctctttagagacacctgagctgctttaacagaactgtctatttcagttaagattctggtgccagagtgaggaaaaccatgtggggagcagttttcagagtacttctttagccagtttacttctgcttaatgacaacagaggacttattctcttgtacaccctctgtgtcctccactgtaatgagaaacccagacaaataacttcttaaggtaccccaggttctagaagcctccgatactgccataacattgtcataaaactttaatccccacctggtagtgaatctaagt

SEQ ID NO: 137 - DNA, 5346 bp, Homo sapiens
tttttttttttttttttttttttttttttttttttcattttaattaacactttacaaagtacaaaatatactgtcttttttgggggaacattaggtaattttttttctccaacatacagtacatgaatctcgagggttttgtgtttcttcaacaagaaaataagcttgagggccccgggggggtagggataagatggcaggttctccccttcacccagatcttgggagcgatggaacgccgctgctgctgctggtgacccgggcacgccaggtgagggttggagggggttgtgggcaggaagtcccctgcccccactacgatggtgggggctctgggcagggcagaggcccctcagtacaccatccatccactcacccccatctcaggataacggaaatgattttggcatagagaaagaggagggcttgggactgttatcagctccctactcttttagagggaactctgctcaactcttcctagactgtcttctgaatacaggtaaactgaggcagtggaagggaaaccgcactggccttggcctgtcttgggacctgaacttggcctgctgttcaccctgccacctccaaagtttgggtgaggggcaggggtctccaattcttctggaccttcttccagaatgagccccagtagatgagggagtgccggcccccacaaactctccctgtgaacaccatctgcaggatgggatgcctttgaagagtcagcacgggcagccccagccccttccaatcagagctgggctgtatcaaaccagagcatggtggaggcaacggcgtgtgaattctgaggctagggataaaaataacacgttggcttttaccctgggcccttgaatctcttgctctggggggaagccgagcgccatattgtgaagacactcaagcagccctgtgggttggcccacctggggaaggactgaggcctcctgcctacagccaggcctcacttagaagtgcatcctccaatccttagctaagatttcagacaacagcaacctcatgagtgaccctgagccagaactgctcaaactgttcctgacacctttgcccccctccagagtagttctgacaagtggggtgaggccgtcctaccagagacgccccaccctctcccctggagccagggtctgcattcgagtcctgccctcactcacctaatcatttctgcactcaaggcctgacaacaagactgctactgagaactcaaaatactccaagagccagtcccatatctcaggtgtgggctctgcacacgtgcacgcacacactctaatgcataggaacacatccacgctcacacgtacatgcacaaacgtgtgcataaacacacctaggcctgcacccccactcctagcacacaggccaccctgcacttccaatttccatagctcctcttcccttatagtgacagccacaagctctctcggccaccaggctgtccctggatgccatggctcaggcctcaggatcctgcctctgctccaggctgctcctggctggcttccttccctggggcctctttcgttattttcttgtagaggcagggtcttgctatgttgaccaggttggtcttgctatcttggcctcaagctatcctcccaccttggtctcccaaagtgctgggatgacaggcctaagccaccgagcccggcctcctttgaatgggcccccaccaggcctaaccccctccctcagcatggtacccaaagccaatgtcttttctctgttggagaagccccccggcctcactcaggctctgcctattacactaaccaatgtctccaatgctccaggccctgctcggagcggactagaaggttgggggtgcttcttcccatccccatgcaaagcgcttcactcaggaagtggcgtcaaaaatcccattggccagggcggggtatctcatgcctgtaatcccagcactttgggaggccaaggtgggcggatcacctgaggtcaggagttcaagaacagcctggccaacatagtgaaaccctgtctctactaaaaatacaaaaattagccgagcgtggtggtgggtgcctgtaatcccagctacttgggaggctgaggcaggagaatcacttgaacctgggaagcagaggttgcagcgaaccgagatcgcaccactgcactccagcctgtctcaaaaaaaaaaaaaaaaaaagatccccccattgcagggctgaggtgctcttgccctaaagccccctctcttagctggggctgggaaaagccctggttgtcaccacatccagatctctaggctcagaaaggggcccagggtggccttaggactccccagggtatccctggaaaatgtggccaggaggagggggccagtgggaggtggcctgtgttcacctttgaagatcaccaaatagtgccctgggctttaacaggggcctggcccttcctgtcttcccagtcttctctcctgacctccagggcatcctctgtcacctcagaggggcaagcccctccagaccaagcctcctcctgctgaacaaatgtcaccctggctacgctgctgcttccggaggccacactggaagcctctgatcccccagctccttcctttcccaccagcagcctggtgcctggaggtgagaggaggtgagaatgccagtggtttggagtgaggctttgggtccccgcctctgaatcttggggaggggaagctaccagggtcaggcctgcaagcctctccagctcagatgcatgcctcgggctgaggacggtggtgtgggcagtgccccttgaaggagggcggtcctggagatgcccatggaggaaggaggtgcagagtcagcaatgcccagatctttgctgggttaggacgacgggctgagggaggaaggggtgtcttgggaaccaggggagccccacgacgaggcagaacttatcagtggcagggaggggtggtcactgctctgttcctccccatccttcagctcccactggtactctgagtgcagcaaggggagagggtggggttgagactatctgagcttttcttaatggagaaccacacaggggccaagacacacactccaggagctcaagtggcagccccagggtcacctgctcacccctagaaattccatgaggccgggcacggtggctcatgcctgtaatcccagcacttcgggaggccaaggtgggtggatcacttgaggtcaggagttcaagaccagcgtggccaacatggtgaaaccccgtctctaccaaaaatacaaaaattagccgcgtgtggtggtgagtgcctgtaatctcacctacttgggaggccaatgtaggagactcgcttgaacccaggaagtggaggttgctgcagtgagctgagatcatgccacagcactccagcctgggcgacagagcaagactccgtctcaaaaaaaaaaaaaaaaaaaattccacatcatagagagccctcttcctcccccgccaggcacctgccccatccgccagcgccaagacaacaggcccactcctctgattacctccgggggatggacggcaaacaggtaaggagttccatgcaactgcggatggagcccctctgagaaacacatgcccctccaagtggggtctggggcctggagagaccctcccacccagcagaccaggagatagctgggggacaagggcagacggcccctgcctgggaaaaaccacactcacaccccaccccgaagagctgtggagaccaaaccaagactacgctacacacagaacgccgagaagataaaccaagctttacacgagcaggatggggatgggaaaactaaaggggccccctgtgaccgaggagcagggtccccagggggcagctcccacggagcgggcttgaacagggaccacccctgcagagccagccagggcggagagccataccctggccccagcgcgccccgacacacatgcttttctccatgacacgaggccagtccccaggagcagccccaggagcacaacctgagatttctaagcttgcaggttacaaaaaacaaaaaaaacagagaagctgcctgcgtaaaaagtgccacccacggaggcaggacacaggcagcgtgtggcccattcagcaggcccaggtcttcagggtgaggctgctggcgagggcaggggagagggggcattctggttaaaagcaagaaattccaaatactcctccctcgggatcaacatccccccaaataagggcgcccagggatcttgcctggggaaagtggggtgcagaaggcatgacccacgccacagcgggctctcagcacccttcccacgtcccatgtcacaggctctttgagctgctggctttgttctctcaagtcaggtctgagggaacccatcggcttctgtaataatcgtattgcctatatacttgaattaaaaatatatggtggctcaaatgtgcccgcgtgtatggcagacggtgcggggtggaggccgtcacgcccatacacgtgtgcacacacagcggggggctgtgtccacggactgcgcacacagtatatattaacatatatattgctcaagtatatatgctatttacagtatatatctctatcaacataaaacacaggtatttataggtgtgtacaatagatacgtcctaggaagtctaggggacacacgactctggggtcacggggccgacacacttgcacggcgggaaggaaaggcagagaagtgacaccgtcagggggaaatgacagaaaggaaaatcaaggccttgcaaggtcagaaaggggactcagggcttccaccacagccctgccccacttggccacctcccttttgggaccagcaatgtacgagttttgttctggagttttgtgcaaaacaaattaacttaaaaaaaaaaaagttggtttctaattaatgtggtgggccttcaacacccacaaggattttaaagaacagcttctccttctggtgggcttccagggctcagagggtcccactcagagaagcagggaacactttgtcaggactagaaaatatcccttctcctctgaccacagaaacagcacaactcggctgggtgtggtggctcacgcctgtaatcccggcattttgggaggccgaggcaggcggatcacttaactcaggagttcaagaccagcctgagcaatgttacgaaatcccgtctctattaaaaaatacaataactagccagacgtggtggtgcgtgcctgtaatcccagctacttgggaggccgaggcaggagaatcacttgaacctgggaggaggagggtgtagtgagccaagatcgtgccactgcattccagcctaggcaacagagccagactcccatc

SEQ ID NO: 138 - DNA, 5339 bp, Homo sapiens
ttttttttttttttttttttttttgagatgggagtctggctcatgttgacctaggctggaatgcagtggcacgatcttggctcactacaccctcctcctcccaggttcaagtgattctcctgcctcggcctcccaagtagctgggattacaggcacgcaccaccacgtctggctagttattgtattttttaatagagacgggatttcgtaacattgctcaggctggtcttgaactcctgagttaagtgatccgcctgcctcggcctcccaaaatgccgggattacaggcgtgagccaccacacccagccgagttgtgctgtttctgtggtcagaggagaagggatattttctagtcctgacaaagtgttccctgcttctctgagtgggaccctctgagccctggaagcccaccagaaggagaagctgttctttaaaatccttgtgggtgttgaaggcccaccacattaattagaaaccaacttttttttttttaagttaatttgttttgcacaaaactccagaacaaaactcgtacattgctggtcccaaaagggaggtggccaagtggggcagggctgtggtggaagccctgagtcccctttctgaccttgcaaggccttgattttcctttctgtcatttccccctgacggtgtcacttctctgcctttccttcccgccgtgcaagtgtgtcggccccgtgaccccagagtcgtgtgtcccctagacttcctaggacgtatctattgtacacacctataaatacctgtgttttatgttgatagagatatatactgtaaatagcatatatacttgagcaatatatatgttaatatatactgtgtgcgcagtccgtggacacagccccccgctgtgtgtgcacacgtgtatgggcgtgacggcctccaccccgcaccgtctgccatacacgcgggcacatttgagccaccatatatttttaattcaagtatataggcaatacgattattacagaagccgatgggttccctcagacctgacttgagagaacaaagccagcagctcaaagagcctgtgacatgggacgtgggaagggtgctgagagcccgctgtggcgtgggtcatgccttctgcaccccactttccccaggcaagatccctgggcgcccttatttggggggatgttgatcccgagggaggagtatttggaatttcttgcttttaaccagaatgccccctctcccctgccctcgccagcagcctcaccctgaagacctgggcctgctgaatgggccacacgctgcctgtgtcctgcctccgtgggtggcactttttacgcaggcagcttctctgttttttttgttttttgtaacctgcaagcttagaaatctcaggttgtgctcctggggctgctcctggggactggcctcgtgtcatggagaaaagcatgtgtgtcggggcgcgctggggccagggtatggctctccgccctggctggctctgcaggggtggtccctgttcaagcccgctccgtgggagctgccccctggggaccctgctcctcggtcacagggggcccctttagttttcccatccccatcctgctcgtgtaaagcttggtttatcttctcggcgttctgtgtgtagcgtagtcttggtttggtctccacagctcttcggggtggggtgtgagtgtggtttttcccaggcaggggccgtctgcccttgtcccccagctatctcctggtctgctgggtgggagggtctctccaggccccagaccccacttggaggggcatgtgtttctcagaggggctccatccgcagttgcatggaactccttacctgtttgccgtccatcccccggaggtaatcagaggagtgggcctgttgtcttggcgctggcggatggggcaggtgcctggcgggggaggaagagggctctctatgatgtggaattttttttttttttttttttgagacggagtcttgctctgtcgcccaggctggagtgctgtggcatgatctcagctcactgcagcaacctccacttcctgggttcaagcgagtctcctacattggcctcccaagtaggtgagattacaggcactcaccaccacacgcggctaatttttgtatttttggtagagacggggtttcaccatgttggccacgctggtcttgaactcctgacctcaagtgatccacccaccttggcctcccgaagtgctgggattacaggcatgagccaccgtgcccggcctcatggaatttctaggggtgagcaggtgaccctggggctgccacttgagctcctggagtgtgtgtcttggcccctgtgtggttctccattaagaaaagctcagatagtctcaaccccaccctctccccttgctgcactcagagtaccagtgggagctgaaggatggggaggaacagagcagtgaccacccctccctgccactgataagttctgcctcgtcgtggggctcccctggttcccaagacaccccttcctccctcagcccgtcgtcctaacccagcaaagatctgggcattgctgactctgcacctccttcctccatgggcatctccaggaccgccctccttcaaggggcactgcccacaccaccgtcctcagcccgaggcatgcatctgagctggagaggcttgcaggcctgaccctggtagcttcccctccccaagattcagaggcggggacccaaagcctcactccaaaccactggcattctcacctcctctcacctccaggcaccaggctgctggtgggaaaggaaggagctgggggatcagaggcttccagtgtggcctccggaagcagcagcgtagccagggtgacatttgttcagcaggaggaggcttggtctggaggggcttgcccctctgaggtgacagaggatgccctggaggtcaggagagaagactgggaagacaggaagggccaggcccctgttaaagcccagggcactatttggtgatcttcaaaggtgaacacaggccacctcccactggccccctcctcctggccacattttccagggataccctggggagtcctaaggccaccctgggcccctttctgagcctagagatctggatgtggtgacaaccagggcttttcccagccccagctaagagagggggctttagggcaagagcacctcagccctgcaatggggggatcttttttttttttttttttttgagacaggctggagtgcagtggtgcgatctcggttcgctgcaacctctgcttcccaggttcaagtgattctcctgcctcagcctcccaagtagctgggattacaggcacccaccaccacgctcggctaatttttgtatttttagtagagacagggtttcactatgttggccaggctgttcttgaactcctgacctcaggtgatccgcccaccttggcctcccaaagtgctgggattacaggcatgagataccccgcccggccaatgggatttttgacgccacttcctgagtgaagcgctttgcatggggatgggaagaagcacccccaaccttctagtccgctccgagcagggcctggagcattggagacattggttagtgtaataggcagagcctgagtgaggccggggggcttctccaacagagaaaagacattggctttgggtaccatgctgagggagggggttaggcctggtgggggcccattcaaaggaggccgggctcggtggcttaggcctgtcatcccagcactttgggagaccaaggtgggaggatagcttgaggccaagatagcaagaccaacctggtcaacatagcaagaccctgcctctacaagaaaataacgaaagaggccccagggaaggaagccagccaggagcagcctggagcagaggcaggagcctgaggcctgagccatggcatccagggacagcctggtggccgagagagcttgtggctgtcactataagggaagaggagctatggaaattggaagtgcagggtggcctgtgtgctaggagtgggggtgcaggcctaggtgtgtttatgcacacgtttgtgcatgtacgtgtgagcgtggatgtgttcctatgcattagagtgtgtgcgtgcacgtgtgcagagcccacacctgagatatgggactggctcttggagtattttgagttctcagtagcagtcttgttgtcaggccttgagtgcagaaatgattaggtgagtgagggcaggactcgaatgcagaccctggctccaggggagagggtggggcgtctctggtaggacggcctcaccccacttgtcagaactactctggaggggggcaaaggtgtcaggaacagtttgagcagttctggctcagggtcactcatgaggttgctgttgtctgaaatcttagctaaggattggaggatgcacttctaagtgaggcctggctgtaggcaggaggcctcagtccttccccaggtgggccaacccacagggctgcttgagtgtcttcacaatatggcgctcggcttccccccagagcaagagattcaagggcccagggtaaaagccaacgtgttatttttatccctagcctcagaattcacacgccgttgcctccaccatgctctggtttgatacagcccagctctgattggaaggggctggggctgcccgtgctgactcttcaaaggcatcccatcctgcagatggtgttcacagggagagtttgtgggggccggcactccctcatctactggggctcattctggaagaaggtccagaagaattggagacccctgcccctcacccaaactttggaggtggcagggtgaacagcaggccaagttcaggtcccaagacaggccaaggccagtgtggtttcccttccactgcctcagtttacctgtattcagaagacagtctaggaagagttgagcagagttccctctaaaagagtagggagctgataacagtcccaagccctcctctttctctatgccaaaatcatttccgttatcctgagatgggggtgagtggatggatggtgtactgaggggcctctgccctgcccagagcccccaccatcgtagtgggggcaggggacttcctgcccacaaccccctccaaccctcacctggcgtgcccgggtcaccagcagcagcagcggcgttccatcgctcccaagatctgggtgaaggggagaacctgccatcttatccctacccccccggggccctcaagcttattttcttgttgaagaaacacaaaaccctcgagattcatgtactgtatgttggagaaaaaaaattacctaatgttcccccaaaaaagacagtatattttgtactttgtaaagtgttaattaaaatg

SEQ ID NO: 139 - DNA, 5896 bp, Homo sapiens
aaaggacccagactccccctgtacctcgcctgccaaccacagggcctgggcccgactcccagcagactgccaagagggccctgtccagaccctcccccacaagcactcagtccttgggggaggagggagggtcccaggagacccacagcctggagcaccagctcctgtcccctcggctctccctggacccgacttgggcaggtagagcctcagcttcccccagtagggacatccctggctttccaggcctgaggtttcttaggtggtgtcccacctccccaacagacaactagaccagcataggactccccgccgtcctcctccctcctctgcccccaagtcacctgcctgcccacccgccccttggctgggggctgtggcattcatgagtacttgacccaggaggcagcttaactgagccttaatagagaaaaccatactttgttttagttttttatttaatgtatttgcacccagggtgctcttggcggtagtttctgtttggcagggataggacctgtttgagttctgtcaagggagcctggaggctctgtgtcactaagctggtgctctgtggctccagggacaggcagtgggaatcgggagatgtcacaggagcctgggccctctcttctgaagggaagctaggagcagagatctgttacaagacgctggagccgctggcaccccacatgggaactcccaccaaccagctgtagttctatctgagcaccagagggggtgagggaaccgagggccatggggaggtggacagcgggtggcaggccagctgagtggtcatgtccaggaggcatggggttagccgtggtgtcccttccagtggggtggttttctgaatgagcaggaccaagggcccctgtggttttggctctggcgggggttttttttttttttttttttttgagatgggagtctggctctgttgcctaggctggaatgcagtggcacgatcttggctcactacaccctcctcctcccaggttcaagtgattctcctgcctcggcctcccaagtagctgggattacaggcacgcaccaccacgtctggctagttattgtattttttaatagagacgggatttcgtaacattgctcaggctggtcttgaactcctgagttaagtgatccgcctgcctcggcctcccaaaatgccgggattacaggcgtgagccaccacacccagccgagttgtgctgtttctgtggtcagaggagaagggatattttctagtcctgacaaagtgttccctgcttctctgagtgggaccctctgagccctggaagcccaccagaaggagaagctgttctttaaaatccttgtgggtgttgaaggcccaccacattaattagaaaccaactttttttttttaagttaatttgttttgcacaaaactccagaacaaaactcgtacattgctggtcccaaaagggaggtggccaagtggggcagggctgtggtggaagccctgagtcccctttctgaccttgcaaggccttgattttcctttctgtcatttccccctgacggtgtcacttctctgcctttccttcccgccgtgcaagtgtgtcggccccgtgacccagagtcgtgtgtcccctagacttcctaggacgtatctattgtacacacctataaatacctgtgttttatgttgatagagatatatactgtaaatagcatatatacttgagcaatatatatgttaatatatactgtgtgcgcagtccgtggacacagccccccgctgtgtgtgcacacgtgtatgggcgtgacggcctccaccccgcaccgtctgccatacacgcgggcacatttgagccaccatatatttttaattcaagtatataggcaatacgattattacagaagccgatgggttccctcagacctgacttgagagaacaaagccagcagctcaaagagcctgtgacatgggacgtgggaagggtgctgagagcccgctgtggcgtgggtcatgccttctgcaccccactttccccaggcaagatccctgggcgcccttatttggggggatgttgatcccgagggaggagtatttggaatttcttgcttttaaccagaatgccccctctcccctgccctcgccagcagcctcaccctgaagacctgggcctgctgaatgggccacacgctgcctgtgtcctgcctccgtgggtggcacttttacgcaggcagcttctctgttttttttgttttttgtaacctgcaagcttagaaatctcaggttgtgctcctggggctgctcctggggactggcctcgtgtcatggagaaaagcatgtgtgtcggggcgcgctggggccagggtatggctctccgccctggctggctctgcaggggtggtccctgttcaagcccgctccgtgggagctgccccctggggaccctgctcctcggtcacagggggcccctttagttttcccatccccatcctgctcgtgtaaagcttggtttatcttctcggcgttctgtgtgtagcgtagtcttggtttggtctccacagctcttcggggtggggtgtgagtgtggtttttcccaggcaggggccgtctgcccttgtcccccagctatctcctggtctgctgggtgggagggtctctccaggccccagaccccacttggaggggcatgtgtttctcagaggggctccatccgcagttgcatggaactccttacctgtttgccgtccatcccccggaggtaatcagaggagtgggcctgttgtcttggcgctggcggatggggcaggtgcctggcgggggaggaagagggctctctatgatgtggaatttttttttttttttttttgagacggagtcttgctctgtcgcccaggctggagtgctgtggcatgatctcagctcactgcagcaacctccacttcctgggttcaagcgagtctcctacattggcctcccaagtaggtgagattacaggcactcaccaccacacgcggctaatttttgtatttttggtagagacggggtttcaccatgttggccacgctggtcttgaactcctgacctcaagtgatccacccaccttggcctcccgaagtgctgggattacaggcatgagccaccgtgcccggcctcatggaatttctaggggtgagcaggtgaccctggggctgccacttgagctcctggagtgtgtgtcttggcccctgtgtggttctccattaagaaaagctcagatagtctcaaccccaccctctccccttgctgcactcagagtaccagtgggagctgaaggatggggaggaacagagcagtgaccacccctccctgccactgataagttctgcctcgtcgtggggctcccctggttcccaagacaccccttcctccctcagcccgtcgtcctaacccagcaaagatctgggcattgctgactctgcacctccttcctccatgggcatctccaggaccgccctccttcaaggggcactgcccacaccaccgtcctcagcccgaggcatgcatctgagctggagaggcttgcaggcctgaccctggtagcttcccctccccaagattcagaggcggggacccaaagcctcactccaaaccactggcattctcacctcctctcacctccaggcaccaggctgctggtgggaaaggaaggagctgggggatcagaggcttccagtgtggcctccggaagcagcagcgtagccagggtgacatttgttcagcaggaggaggcttggtctggaggggcttgcccctctgaggtgacagaggatgccctggaggtcaggagagaagactgggaagacaggaagggccaggcccctgttaaagcccagggcactatttggtgatcttcaaaggtgaacacaggccacctcccactggccccctcctcctggccacattttccagggataccctggggagtcctaaggccaccctgggcccctttctgagcctagagatctggatgtggtgacaaccagggcttttcccagccccagctaagagagggggctttagggcaagagcacctcagccctgcaatggggggatctttttttttttttttttttgagacaggctggagtgcagtggtgcgatctcggttcgctgcaacctctgcttcccaggttcaagtgattctcctgcctcagcctcccaagtagctgggattacaggcacccaccaccacgctcggctaatttttgtatttttagtagagacagggtttcactatgttggccaggctgttcttgaactcctgacctcaggtgatccgcccactttgggagaccaaggtgggaggatagcttgaggccaagatagcaagaccaacctggtcaacatagcaagaccctgcctctacaagaaaataacgaaagaggccccagggaaggaagccagccaggagcagcctggagcagaggcaggagcctgaggcctgagccatggcatccagggacagcctggtggccgagagagcttgtggctgtcactataagggaagaggagctatggaaattggaagtgcagggtggcctgtgctaggagtgggggtgcaggcctaggtgtgtttatgcacacgtttgtgcatgtacgtgtgagcgtggatgtgttcctatgcattagagtgtgtgcgtgcacgtgtgcagagcccacacctgagatatgggactggctcttggagtattttgagttctcagtagcagtcttgttgtcaggccttgagtgcagaaatgattaggtgagtgagggcaggactcgaatgcagaccctggctccaggggagagggtggggcgtctctggtaggacggcctcaccccacttgtcagaactactctggaggggggcaaaggtgtcaggaacagtttgagcagttctggctcagggtcactcatgaggttgctgttgtctgaaatcttagctaaggattggaggatgcacttctaagtgaggcctggctgtaggcaggaggcctcagtccttccccaggtgggccaacccacagggctgcttgagtgtcttcacaatatggcgctcggcttccccccagagcaagagattcaagggcccagggtaaaagccaacgtgttatttttatccctagcctcagaattcacacgccgttgcctccaccatgctctggtttgatacagcccagctctgattggaaggggctggggctgcccgtgctgactcttcaaaggcatcccatcctgcagatggtgttcacagggagagtttgtgggggccggcactccctcatctactggggctcattctggaagaaggtccagaagaattggagacccctgcccctcacccaaactttggaggtggcagggtgaacagcaggccaagttcaggtcccaagacaggccaaggccagtgtggtttcccttccactgcctcagtttacctgtattcagaagacagtctaggaagagttgagcagagttccctctaaaagagtagggagctgataacagtcccaagccctcctctttctctatgccaaaatcatttccgttatcctgagatgggggtgagtggatggatggtgtactgaggggcctctgccctgcccagagcccccaccatcgtagtgggggcaggggacttcctgcccacaaccccctccaaccctcacctggcgtgcccgggtcaccagcagcagcagcggcgttccatcgctcccaagatctgggtgaaggggagaacctgccatcttatccctacccccccggggccctcaagcttattttcttgttgaagaaacacaaaaccctcgagattcatgtactgtatgttggagaaaaaaaattacctaatgttcccccaaaaagacagtatattttgtacttgtaaagtgt

SEQ ID NO: 140 - DNA, 6547 bp, Homo sapiens
tttttttttttttttttttttttttcggttttcgagacggagtttcgtcttgttgcccaggctggagcgcatggcggatctcggcttactgcaacctccgcctcccgggttgctcctgcttcagcctccctagtagccggcataacaggcacccgccaccacgctcggctaatttttatatttttagtagagacaggctttcaccatgttggccaggctggtctcgaactcctaacctcaagtgatccatccgacttggcctcccaaagttctcctagcaccaccatgatctcaggactaaccactgcacacccgtgatgggattccaaaccttcgctgcaagaggacaaggtgacgagttgctgacagtgaaggctaaactaacgcggacagtgaagtgctacatgagtcggactcagactccaggtgagcagccagcagaggtcagagagagacagctcacgttccgggtaagttgcaggtcgatttcagggccgactcatccagattactcattcttcatttcaggcaattgtatgactgctaaatactgctgctggggcatctggggttgggaagtcatttctgccaggtctttgacccctgaaagcgtcgttgcgtctcgcgccgcgggtaggcagggcgggatttctaggaggaccggcagaggcgcgcataggtgcgtggtgctgggcccgggcgccgcggcaccggtgtaggagcgcgcatctccagagtttcttccatctgggcgacgtctcggtgcctgcggcgggaacggcgctttgcttccctgaggagcttctagagagctacggtggcccccgtgtgggaggcggggggcgtggcggcgtcggggcgtcgctgtcccctcctcggtagctctcctccctcccctttctgctgttaccgggagcgcggtggccacggaacgctgcccggagccgcgcgagggaggacccgacgcgcggcgtttacccagcgcagcgttccaccgctcgggtttggctgggtgaggctggcggggccgggggcgagaggggagcggcgcggggtggagagggtggttggagaaagggaagggagggccgcgggagaggttggatggtggaagtggcgccagagaggtttgtgcccagcagagacacccaggtatcttagggtcgctcagagcagtgtcggggaccccttggagacagtaggaaggggctccctcgcggggtggcggatttctatcccgttgactttgtagagtgaggttgaccctgtgttcggcttgggccgggaagggcgcagaagcgggacttcaggacacttttacgcagggcgattctcagagactacaaagcctgcgccctgcgtcctcccaggcgcagtgttctgggatcagtgtcttttctctgttttcgtcctcaacacagccaaagtcgtggatatgtggtgacagaaaaacatttggctacataactgagctaggctggagtgtgaaatcgcggcgtgttatttggtccgggcgccctacatagcaacccccactcttctcgcccccaaccccccgccacgccggacacggtcaggcgggcgttcccccaacccgccccttgtgaagtccacctgctgagactgatacagatcccctgcgaacttgatgctgtccgcttggaaaacgtggagaactttcagaggaggggttatttcgccttgagtgaaaattaagactcaaaggaaaaggtatactcaagagctgcccttactgggttatttctgtggaatttggaaggatctttgaattgaagatgtggtgggagcgcgcagagaacagagaatccgtaagcttgagtttcttagacccagtttcttaaagccaaagtagcggggagatcttggcaagtcaagaaaccttcttgaacttcagttcccttgcctcaggggagaatactccagccataccccactgtgtggtttagaaggttaatggcctggagggagggaagtgttttgaagcctataaagtatcctgtgaaggtatcaccacattgctgcccgctgaaacactgccggccgccgacagaactttgtttggagccgagttaagacagcatctttatggcagtgctggggttttcgtgattaccggtccagagtgtcaggacacctctgtttctcaaaccccagtttctgcactgccacatgaaactgctcattactgagtgacagcagaggacaggaactttgccttcttcattaacttctttagggcctttacaaagtgggagatggtaggaactttgatgaaaattgagggtcatagccttggagcggggtgaggggttagatttgactggacatagtcttcatgcaaccgtttaacaacaaaaacattgttggctgagttcttgttttttgatacaaggaacattctgtcggagccaaggttaaacatccaagagtaaacgtttgttggttttttttttttttttgcatgatctttagaggataagtaaaaaactaaagaaaggctgcattgcttgctgacacattttttccccacccatctgaaggcacacaaataatagcactggcaaatttgaatagtttcccttgttaccaaatctacgttcttatttctaatatggaacgattatttctagtatggagagaaatatggaatttctaatatggaagatttagcatggtgtgtcattgtaaaaatttagtcagttcttggataagtatgtccagccttccagagactataagtgtagtaatattagtgcctgttagtcatattgtgtatcttcctgatacccaattagatctctgattgttttttctttttaattaaaaggagctgaaagatgactcagttaagaagctggaaaataaaaccaggtctctgtaactgtgctgtcttattctgaactgaaagtctttctgcaataataatgatggtgataataaagctaaccttcataggacattgtgtaccagactgatacacgtgctacaattctgttcgttctcacaccatccttcatgggggaggttaagagcattgctcaaaatcacacagctaataagtcatttttctcagattggcgttaaaattatatttaattgggtcctgtgtgtgcgagtgttttaacttttgcattgtcttttatcccacacacggaggcaacatggatggtgagactaggggctatggacaaggttccagggtttggacttgagcatgctgctgagtggctatgtggtcatcactttacttccttttctaacccgtaaaatgatgataataattctacattgaatgaatcctttgtttctactgagcccaaagtctgctccgtaaaggtaaaatacttctcagagtgtagaaagaaaagtttcagattcaagcctttttgtcatcagtaggctggaaaatgaatagaagttagaataaactatacacttaatgtgatttttccaacaattatgttgaaaaattgtttaaaaatgcattcattccaatgatccttagctttatatttattaaaagaagtaaatgtaaattagacctcaacgttttttttaacaggtaacgttgaaaagcacccacagtaagcaggtactgtttgctggttgattttagatgatgaaaattgtagagtaagtacgtttgcagaaaactgtagagtaagtacaattatagagtaagtataagaagaattgtattcaaaggtattgtattattcttataaagaaatgtattcttcttacacttttttacgttcttttattccgacaagctagagttgatcagaaaagaactgaattccaaaaatatatttagggcacttccctattctctctgtatttacttggaaatgattcttagaagtttttggcatgggacttttaagtttgttaagtgaagggactagcacttatctatatgcatattttgcaagtatttttaaaaatatggctcaattgttaaatcattttattcgtcccatgacttatataaaaatctgggggttttttggttgctcacttttagtttaggcttggttttatggtgatctgggctcagggaggtagacatgtcaatgtcattagcattgccaaggtataggcagtctgctgcatgctgtgtgaatattaatattctgaagagatatttgagtccacaagatttaaagatcttctgttcaccgctgtgcttgtagaattagggctaaattagtttagcctgggcctcctgggtcttggtcatttgaaaatagctcctcaagtaggctggctatgtgtcttagtatagcagaaacaattcattattcactccatgtgtcgtctattatactgtgaaattacagatgatagttttcttgctttctgtttttccaaacagtgccacctggacttgtgggtttggctcatatactgactgtttcttaatcaagatagctttaatagtcttcaccctacccccatcctccagctgccctttggatgttgctgtgtagaaaccaagagagttcatttttgttgggggctgggctaggttgctaataatctgaagcaccttgaaggattctgacctaatcaaggcataaggaaatgatgtgtgtgtgtgtgtagaaaatttggaactgtgccaggcacaaagtaaatgtcatataagcattagttatgagttgatgaggaggaaggtgtcagaagatgaatgctgtagagaaggctatggggcagtacatggagagagtggttatctgtagagatgtggttttgtcataggtgatgggaaaggtctcagtttgaaggtgatgggtaaggtcttcatttgaataaagatccacaagagagtatgggtagaggggcatagaggtgtccaggtagcagataaggaggtcagataggcaacctagggactcctggacagatgtagcaaattgaaggtttttagaaaacttaaacaggaattttttaatggaaaatttcaaacttaaacatagaatagtacaatgaacaaccttctcccttctcccagcttcggcagttatcaacatggccagttgtgcttcatccatgttgcccactggcattattttaaagcaaatttaagaaattctaccaattatttctatttatcgtccccactgacattctatcagttatttctaaatacttctgtatatatatttctaaaaaataggcacttaaaacataaccacaatacttaacttttttaccttgtttatcatctgtaaatcttggccttagagccttcttgcagcactggttgaaagataagcatggataggccaggcgcggtggctcatgcctgtaatcccagcactttgggaggctgaggcgggtggatcactaggtcaggagatcgagactagcctggccaacatagcgaaacccagtctctactaaaaatacaaaaaaaattagccgggcatggtggtgggcgcctgtaatcccagctacttgggaggttaaggcaaggagaatcgcctgaacctgggaggcagaggttgcagtgaactgagatcgtgccactgcactccagcctcggtgacaagagcgaaactttgtctcaaaaaagaagataatcttggatgtctggattcctcagggtagggtctgacagtaggtgctcaattgctagtggtcatctgttgtctttaccagcccttgatttttttttttcttttccttttctagatagttctatcatgacaatttcacttttacttcctctttcttctccttacctatttttgacacatttattcagtatttcccgtatctactctctacttctccttttaactttctcctatcctttcagtatttttgttcacagcctggtgtgtagcttgtgctcttttgatccctgtagcccatgaaatacagctccctttagttctagatctttttgaagggagatgagcatttcctattcttattttttaaaaatactgttactgagattgagatagaatttacatgccaaatgcttcactgatttaaagtgtacaagtctagccaggcatggtggctcttgcctataatcccagcactttgggaggctgaactgggaggattgcttgaggccaggagtttgagaccaacctgagcaacatagtgaggtctttcctctacaaaaataaaaaattggccagatatggtggcacacctgtggtcctagctgctctaaaggctgagacaataggatcactagagcccgggaggtcaaggctgcagtgagccatgatcatgccactgcactctagcctgagcaacagaggccgaggcgggcagatcacctgaggtcaggagttcgagaccagcctgacaaacatggagaaaccctgtctctactaaaaatacaaaaattgccgggcgtggtggcgcatgcctgtaatcccagctactctggaggctgaggcagaagaatcacttgaacccaggaggcagaggtttcagtgagccgagatcgcaccatgcgctccagcctgggcaacaagagcgaaacccgtctcgaaac

SEQ ID NO: 141 - DNA, 4628 bp, Homo sapiens
tttttttttttttttttttttttttgagttgaaagacctgtaaagaggttaaaaaatgaatacagagtgggagaaataatttgcataccatatatctgacaaagaacttacatctagcatatgtaaaaaattctcaaaactcaatagtaataaataaggtatccaattagaaaataggcatatgtgacctctctgtattataacttaaacctcatgtgactacaattatttcaaatgaaataaacaaaacagtaatgcctgtttctagcatataaaataatcagagaacatagaattatacaaagttaaattattgggccatttacttaatttaaatatctttaaatgcgtgtacccattttgcttgaaggtgtgtgcaagtatgcttgtatttttttaacgataatatggtcacatgagcattaaatttatttttttaaagtttatagttaccccacacaagttcttattgattccctcgttcttaacacctgcatagtatttcattttataattaatggattgtaggtttattcttttaaaatcacttgtgttgttctcatgtttttttttttttcactagaaagtgttgcaatgcacaaaactaaaatataaggagggtcttttctggatctctgttgaaaaactttgaataaaaattacaagttcaaatcacatgcaaaataaacattttaattaatagggcttttatgcaagatgttagtagcagtagcagcacagttttattaatatccctgaatctctcacaaaaacggactgagcaactaggataacaaggtattaactacgacaaaacaatgtaacagggtgtcatcatggaccttttgtgaggttaaaccacagggacccaggggaatcaccaatttttttggaagaaggaaaggaaaggaaaaaaatgtttaatggccctgggaactggaaaacctagatatacaagcgctaacatctatgttcctaaattcagagattcttagtaggcaaaaagaactcagcagattaatctgagaacagcagctgaggctggcagaaggcttcctgggcctcaactcattgctgagagtgaggatggcataaagcaggtgctgtgagtggtctgtttcctatgaaccctacaaattgaccacccccaaaacaaagccctgtcctaaggagaaactgcaggaagtcaattataagttgagttgggaagcacactgaggctcaagaaaagggaagctccaggttaagatgcaagagaagaagggaaaaggcagttttctgcaagttcaagcacaaataatttctttaccttctagttctggaaataccaggtgctgtgtatgtaaagcaggaattttggttgaatattatataattttctgacccactgttactaatccagtttcccctgtactcagatcttccatgctacagacagaccgacagatgctcagcaaatagtagctaatatttctaggaacctaggtgctaaatgagttttcttaaatttctacctccaggtctgtaagttgatttgaaccattacccgtttctggttctgcacaggttgttgagcgcaggacttctctcctccagtggaaagtccacctgctcacaatcaaccatcctttcctgcagccttggagacactgttcagtgtagcacccctcccagtctagaataggcacactcatcatcagtctctctcattttctgtcttatctccattccatctacgtacagtttttgtttcgccaatgtttttaaatacacaactgtacaagcacaacaatgacaacagaaaccttccttcccccagtgttgtagtgagcaaggaatatatttaacttcaaataaaagacaaaaacaaatgctggataaagctgacagaaagaaatgcaactgtaggtgctctggcaatatagaaatgatacaactaagaaaaatggaagaaaaggaaagagaaagtattcctcagaatgattttactgactgctcatctgtaatgcctgggagtcaaaggatattgtttatagaaatgtaagcatacttaatggcaccaggggaaacaaagttaatatgattaaatcaaattgtgggatgaaaaatcacatagggaggacaagaaagagaatacagctaataccattgttcttagtttagagacattagctactgtccaaagaaagagatgattttatgaaattacataaggtagccatcagaataaaagtttaactcttccaaatatcacaacatcaaaacaaaagcaataaaaacaaacaagacagcaaaagacagatatgtgcatataaatcatagcataatatactgtaatcaaaatataaccaaacacaacttatcattaaagtaagtggacttgactcttattagaggaaaaaatattgtcagattaaatcgaaaagcaaatcttaattctatgctggatataagataaagtgttacagaaagtttagaaataaaagtataggcaatgaataaaaggatcttctcttcatgcgttaggagtataaaacagtacgtaaacacatcatacgttttctgttttacacttaaatggctggagatgttacaccactagtatgaatttacttcagatatataaaggatacactttcatgtggttagaaacaacaatgataacagttaaggtgaaaataacatctgcattgacgctaggaagaaagagccattgttgggtacatagtgatcacattaccatggagcaatctgttcccaactgaaatgtccttgcccttctactgaaatcatgtaagattctgcaaaagtagtgtttacttcctacaaatcagccatttgtgggaatggctgctattgttgtccacacggaatgagcatcagacctatatttagctgttgtatcattaagagtcgtatttggccctttccagaggctgttatttcaattatattttggagaattagtctatttccagacaaataatttttccagaactttgatccatatgaaatgaccctttggtagggatccagggattgagtttattttaattactgtagcatcctggtcaggttgagaaacagattacctttatatttccctggcatgtgagcaggtctagatttagcgtgagaatgcttgaaagtttatagttttttagaaattttatttactgtgtgtctctttatcaaaataaaatcaatgctgaaaagctatattaaatgaattattttgagatggtctcttcccccttcttccaatgagaggatatccacagatatgtcaggagcttgctttacctagaaatgtgttgagggccacaggtttgggttcacctgggaatgtttagggacacctccccaagttgttgttgaagagtagggtaaatgtaagatagaattaggctcacagaggccagatgagagcatcatgtcaccccagaaacacagcatatacctgggagatctgttctcagtatcaaagtcttaagcactgtaagactgcctatagaccaagacaacaactatatatatatatagttaatgaaatcagttaatatataaacatatatttatatattattttatttttatcttcagacagcatctcgctctgtcacctaggcttggagtgcagtagtgcaattaaggctcactgcagccttgacctctggggctgaagctatcgtcctgcctcagtctcctaaagtgctaggatgagaggtgtgagtcaccttgccaggcccagggcaataactatgcaatgtttatataatttggagcaaaaaatatttgaaatatgtgtgcattgctttttaaccttttctattgatttactttattaaatactgaacagaaacaatatatttataaaatatttattttatatatacaataagcacataatgaacacctgtgtctccagtcttggtttaagaaattaagccaaaagtaatcataagtgcttatgattacttttgaagtcacctgtacaacttttgctgactacatccccttcttcaacactctaacgatggccactgtgagcactgtgtatattgaattgtgttgtatttcaataccgtgtgcactacattgttttcctggctgtaggctattgcatttagtgagcataatgaattatcagtataattcacttttgtcatttcattgtttcagcttttctgtactaattattgccaatatatttctactggcataaaaacagacacataggacagtggaacagaatagagatcgcagacaaatctacacatttacaaacaactcatctctgacaaaggcatcaagatcatacactgggaaaacaacagtcttttcaataaatgatccggggaaaactgaataactatatgcagaaggataaaattaaacccatctcaccatacacaaaaatcaaatcaaataaaaattgattaaaggcttgaatctgagacctgaaactatgaagctggtaaaaaaaaaaaaaaaaaaaaaagcataggaaaggctgggcgcggtggctcacgtctgtaatctcagcactttgggaggccaaggcgggcggatcataaggtcaggagatcgagaccaccctggaaacacggcgaaactcacgtctcacc

SEQ ID NO: 142 - DNA, 3197 bp, Homo sapiens
tatttattttgctctgttgcccaggctggagtgcaatggcgtgatctcggctcactgcaacctctgcctcccgggttcgggtgatcctcctgccttagcctcccaagtagctgggattacaggcacctgccaccacgcctggctagtttttgtatttttagtagagacgatgtttcgccatgttgaccaggctggtctcgaactcttgacctcaggtgatccgctcgcttcggcctcccaaagtgctgggattataggcgtgagccactgtgcccagcctcacagctgcatcttaaccttacctttgcctctgcctctcaagctggtacctcctaatttacatcctaagagtggaaccatgtgacaaggactggagtgccattggctgtggactgttcaggcagggaagtacaagaccactcttgtattcaggggcaaccaaaggagagaattacgtacttgttgagtacaaactgcaccaagccctggagacccattaccaccgttaaccctcaatacagctctgctagtaagggattcgtctccccaaatgaaaaaaaaaagtaatctcagaatgttggccgagcatggtggctcacacctgtaatcccagttatgcaggaggctgaggcaggagaatcacttgatctcaggaggcggaggttgcagtgagtcgacatcacaccactgcactccagcctgggggacagagtgagacttcgtctcggaaaaaaaaaaaaaagttgacaggatggccagacccaagtgggcgtattaagtggtggtgctaggattggaacccaagcgtgattaaaaccctatgcaggccctttcctctatattgtactgcctccttaacaaaggaagattgattaagcccctactttgtgccagtctctgttatcaagtccgttaaatgcatttaacgttaaattttttcttttttggtttaaaaaactctagtttcttaaactactagttttagtgtcttgctaaaactatgtgctcttgaataggctacaacttatttcacactatctcattgaactctcctggtatgtgatagtgttataatgaaaaattgcataccaggacagctaagtctattttgcaaccatacagcgtttcataatttagcatttaaaatacagacagtccccgacttttggtggtttgatgtgggatttttggtggaaaagcagtatacattcagaatgcacctctacttatgatggggctacttcctggtaaacccattgtaatgtgcaaattacgggttatcaggaggtgaccccatcggtaatggagaagtgctgggaggtaaatattagaaatggaagtatctaaatgagtaagaaacagcatgggagcataatttggccaaaatcaaacagaactaaagtagtcatgtcggtaagaatttgggactgcgggccagttacgatggctctcacctgtagtcccagcattttgggaggccgaggcggcggatcacttgaggtcaggagttcaagaccagcctaaacaatatggcgaaacctcatctctaccaaaagaatacagagattagctgggcatggtgtctcatgcctgtagtcccagctacctatggggctgaggcaggaggatctcttgagcccaggaggtcgatgctgcattgggccgagattgtgccactgcactccagcgtgggcaacagagtgagactgtctcagggggaaaaaaaaagaggaaaacaaaaaagacgttgggagtgcagtttctctacctacagcatatctcaaaggttttttttaaaaaagtattttcttaactttttaccttcatttttcaaaacaattagggtacaatttacatatagtaaagttcactctttatagttttagttatgtgagtttgtacaaacatatacaggagtgaaccactaccacaatcgaaatatagttgcatcacccccctaaaactctccaggcccttttgtagtcaactcctacccccgaccctcagattctgctaaccactgatttgttttctgcccctatagttttgctttagtatgactgtcatatcaatagaatcatacaatgagtaggcttattttatgccttcaggttttaaaaattataaacatttacattacagtaaaattcactctggtatacagttctataaagctctgataaatgtgtagagttgtgtaaccaccaatgcaaccaaggtacagaacagtcctcttagcctctccctaccaaatttattcctgctactttgtagtcaaaaccagtcccctacacccaaaccctggcagtcactggtttttttcttcgttctcttttttttttttttttttttgagacagagtctagctctgttgtccaggctggagtggtgcagtggcgtgatctcggttcactgcaacctccgcctccagggttcaggcggttctcctgcctcagcctcccgagtagctgggattatgggcgcccgccaccacgcccagctaatttttgtatttttagtagagatggggtttcactgttttggccgggctggtctcgaactcctgacctcatgatcctcctgcctcagcctcccaaagtgctgggattacaagagtgagccactgcgcctggcctttttctttgttcttatatttttgtcttttttttttttttttttgaaacagagtctcactctttcactgaggctggagtgcagtggcgtgatcttggctcactgcagcctccacctcctgggttcaagcgattctcctgccttagcctcccgagtaacagggactacaggtgcccaccaccatgctgggctaatttttgtatttttggtagaggcgggggtttctccacactggccaggctggtcttgaacttctgacctcaaggatccgcccgcctcggcctcccaaagtgctgggattataggcatgaaccaccgtgtccggccatatattttcgtcttttgaagactgttatatacatgaaattatatggtatgtagcattttgagagcgacttcttttgctatgagtaatacatttgagattcatccatatttctcagtatattaatagttcttatttctgagtcactccattgtgtggatttactactgtttgttccccagttgaaggatgtttaggatctttgcagtttggacattacaagtaaagctgctataac

SEQ ID NO: 143 - DNA, 2891 bp, Homo sapiens
tttttttttttttttttttttttttttcgacatgaagaaataaaaccatgtttattcacagaagatatgattgtctatgtagaaagtctggttaaatctgcaaaaaaagctactagaactaagtgactttagcaaagttttagcacatactgctagaaaaattgggtaaccatatttttttaaaaagcatagattcataccttgtaccatatacaaaaattgactcaaaatggatcatagacctaaatgtaaacctaaaactataaaacttttaggaggaaacatgggagaaaacctttgtcatctcatgttaagcaaagactcctctgatgtaacacaaaaagcatgatccatagaaaaacaaattaataaatttaacagccatggtggcacatgcctgtggtcccagctactcaagaggcggaggtgggaggttcgcttgagcccaggaggtcgaagctacagtgacctatgagcacaccactgcaccccagcctgggtgacagtgagatcctgtctcaaaataaggggagagatctccatacccatattcataacagcatttttcacaatagccaaaaggtgggaacaatgcacatgtccatcagtggatgaatggataaataaaatgtggtatatacacacaatagaataatactcagcattaaaaagaaaagaaattctgacgcaggctacaacacagattaagcttgaatacattatgcaaagtgaaataagccagtcacaaaaagataaatattatatgactatcagggtattcaaattcagagacagaaagtagcatggcagtcgccagaggttgtgggcagaaggggttgggaggttattgtttaataagtacagttttggttatgcataatataaatcattctgccataaagacacatgcacacatatgttcactgcagcactattcacaataccaaagacatggaatcgacctaaatgtctatcaacgaaagactggataaagaaaatgtggtacatatgtgtggggattatgggaactacaattcgagatttaggtgtggacacagccaaaccatatcagatggtaacgtttatgttctgtgtattttaccataatttttaaaaataaaaacaaatgtgtcaataaagctttcccataatgaaaaaagacaccgtttacagaatgagaagacaagatactggccaggcacaatggctcatgcctgtaatcccagaactttgggaggctaagacgggtgtatcacttgaggtccagagttcaagaccagccttgccaacatggtgaaaccttgtctctggtaaaaatataaaagttagccaagcatggtggcctgcgcctgtaattccagctactcaggaggctgaggcatgagaactacttgaacccaggaggcagaggttgcagtgagccgagattgcaccactacactccaacctgggtgaggactctgtttcaaaaaaaaaaaaaaaaaaaaacacccctgtatccagcatataatcctcaaaattcaaaaataataaaacaatccaaaatatgcaagagatgtgaacaccttgccaaagaagatatgtagatagcaaataagcatataaaatatgctcaaatcattagaggatgcaaataaaaacgatgagataccaccacatacttaatgtcaaaaaacctggctgggcatggtggctcacacctgtaatcctagcactttgggagaccgagatgggaggattacttgaggccagcagttcaagaccatcctggtcaacacagtgagaccccatctctatttaaatgtattaaaaaaattaaaaaatttaaaaattaaaaaactaaactgacacccccaagtactagagaggatgtggaaatgaaactttcatactgatgggaatgtgaaatggtagagccactttgaaaaacagtttagaagtttcttaaaatgtcaaacatatgcttaccatatatcccagcaatccaactctaggtatttactatagataaatgaaaacacaaaatgttgcatacaaatgtttatagcagctttacttgtaattgtccaaaactgcaaagatcctaaacatccttcaactggggaacaaacagtagtaaatccacacaatggagtgactcagaaataagaactattaatatactgagaaatatggatgaatctcaaatgtattactcatagcaaaagaagtcgctctcaaaatgctacataccatataatttcatgtatataacagtcttcaaaagacgaaaatatatggccggacacggtggttcatgcctataatcccagcactttgggaggccgaggtgggtggatctttgaggtcagaagttcaagaccagcctggccagtgtggagaaacccccgcctctactaaaaatacaaaaattagcccagcatggtggtgggcacctgtagtccctgttactcgggaggctaaggcaggagaaccgcttgaacccaggaggcggaggttgcagtgagccaagatcacgccactgcactccagcctcagtgaaagagctgagactctgtttcaaaaaaaaaaaaaaaaaaaaaagacaaaaatataagaacaaagaaaaaggccaggcgcagtggctcactcttgtaatcccagcactttgggaggccgaggcaggaggatcatgaggtcaggagttcgagaccagcctggccaaaacagctgaaaccccatctctaccaaaaatacaaaaactagctgggcgtggtggcgggcgcccataatcccagctactcgggaggctgaggcaggagaaccgcccgaaccccggaggcggaggctgcagtgaaccgagatcacgccactgcaccactccagcctggacaacagagctagactctgtc

SEQ ID NO: 144 - DNA, 1439 bp, Homo sapiens
tttttttttttttttgacagagtctcacccaggtggagtgtagtggtgcgatccggctcactgcaacctctgctcctgggttcaagtaattctcatgcctcagcctcctgagtagctggaattacaggcgcaggccaccatgcttggctaacttttatatttttaccagagacaaggtttcaccatgttggcaaggctggtcttgaactctggacctcaagtgatacacccgtcttagcctcccaaagttctgggattacaggcatgagccattgtgcctggccagtatcttgtcttctcattctgtaaacggtgtctttttttcattatgggaaagctttattgacacatttgtttttatttttaaaaattatggtaaaatacacagaacataaacgttaccatctgatatggtttggctgtgtccacacctaaatctcgaattgtagttcccataatccccacacatatgtaccacattttctttatccagtctttcgttgatagacatttaggtcgattccatgtctttggtattgtgaatagtgctgcagtgaacatatgtgtgcatgtgtctttatggcagaatgatttatattatgcataaccaaaactgtacttattaaacaataacctcccaaccccttctgcccacaacctctggcgactgccatgctactttctgtctctgaatttgaataccctgatagtcatataatatttatctttttgtgactggcttatttcactttgcataatgtattcaagcttaatctgtgttgtagcctgcgtcagaatttcttttctttttaatgctgagtattattctattgtgtgtatataccacattttatttatccattcatccactgatggacatgtgcattgttcccaccttttggctattgtgaaaaatgctgttatgaatatgggtatggagatctctccccttattttgagacaggatctcactgtcacccaggctggggtgcagtggtgtgctcataggtcactgtagcttcgacctcctgggctcaagcgaacctcccacctccgcctcttgagtagctgggaccacaggcatgtgccaccatggctgttaaatttattaatttgtttttctatggatcatgctttttgtgttacatcagaggagtctttgcttaacatgagatgacaaaggttttctcccatgtttcctcctaaaagttttatagttttaggttttacatttaggtctatgatccattttgagtcaatttttgtatatggtacaaggtatgaatctatgctttttaaaaaaatatggttacccaatttttctagcagtatgtgctaaaactttgctaaagtcacttagttctagtagctttttttgcagatttaaccagacttctacatagacatcatcttctgtgataaacttggtttattcatgt

SEQ ID NO: 145 - DNA, 6332 bp, Homo sapiens
aaacaggatagtcacatggcattagagtgacatccgatagctttttttttttttctgagatggagtttcgctctttttgcccaggctggagtacaatggcacaatctcagctcaccgcaaccgccgcctcctggttcaagcgattctcctgcctcagcctcccaaagtgctgggattacaggcgtgagccactgtacccagccagctgtcactcttttataaaatgagcttttccctttctagagggtatgaactagagttcctccaaaaaaagccaggtaaagacctaagtctttcccttttaataccaatttttagagcaagaagttagtataataattgcttcctaataattactatggtgactgtatggtaaatgcacctgatagcaataactgaagatagcaatagcctgagaatggccccgtatggcagatgcacctgaatgcgatagggagtttccagctcaggaacccagagatccatttctgatctatggggaacatctgagctcctggcctgtcccgtgaaatgcaggccatacggggaattgaggccctttgttttggtttaaatgaaggttgccagctgcaggttgttagggggagggtgttaggtgaaaatgctatataaaccccatgcatttgcaagtggttgcagttccgtccagcccatcaccactgggagtctcccttgaatgtaagaccccagttaaaaacaaaaaagcaaacaaacaaaaaaacaccatgtcttgtttgctgtctctggatctgttctttggcctcttgaatctggttctgtccaaattggagttgacagtggtctggcacaatagtggcaaagttgtttccccctgcttttttttttttttttttttgaatatcacttgattcggtgatttgcttatttgaattccgtgtttttaagctcagttcaattattttccttttgatgctcaaattttctacagtttgaccagtgggagtcccttcagctggctctcatgtcacttaacatgcctccattagtatttgagtacttccttagattctggcacaagattcccagggtcactttacattttccttgccctagtcctggaaccagccatttccaatgaaccctggttcctttcagtgtagaatggtgtttagaaaccaagatccgggctgggtgcagtgactcacgcctgtgaatcccagcacattgggaggctgaggtgggaggactgtttgcatccaggagtttgagaccagcctggtcaacatggcgagacctccatctccacacacacaaaaaaattttccaggcatggtggtgtgtgcctgtagtcccagctactgaggaggatgaggcgggaggattacttgggcctgggaggtcgaggctccagtgagccatgattgtaccactgcactccagcctaggtaacagcgtgtggcccagtctcaaaaaatatataaaaaatattgatgcctgggccccagacattccaatttaattggtttggggagggtcttagtcatcagtctttttaaaattactgtccaccctgcccggtgattctagtatgcagtcaaggttgtgaaccagtagtcaagatttacctgtcaaagtgtgatccctggaccagcagctttggcatcacctggaaacttgttagaaatgcacacatttgggctctccctcaactgaatcagaaacactggggctagggcaatctaatttaacatgtctttcaggtgattctggtgtgcattcaaatttaggaaccactggttcagagcaactattctcagccttggttgcacatcacctggagaccgtcaaaaacaagttcctgagtgtcatcacttcacattctgatttaattcattttgggtgtagccctatcatcattattttaaaagctctccagatgactgttgtgtagccaaggatgagaatcacgttggatttttggtctctaagcctggtgtttggtgtgatgagtaaaagtgcacaccaggttgcagataaaacgtaactacagtagttgggtaatacataggccagatagcttgtctttctgcttgctactcttctagacttacccaggtgttctgagcactggtttgcagtcctttgcaaaggtttttatttctttaaagcacttcctttctcattccttctgccattattttggggggtgtggtagaaagtagggctaaggtatcatcagctactagtaattctagcgaaagattataattcctagcctaagttaataaattagctctcaggccgggtgcggtggctcgcgcctataatcccagcactttgggaggccaaggcaggtggatcacctgaggtcagaagttccagaccagcctggccaacatggtgaaaccccatctctactgaaaatacaaaaaattagctgggcacggtggtgggcgcctgtagtcctagctgctcaggaggctcaggcaggagaatcacttgaacccaggaggtggaggttgcagtgagtggagattgcgctattgcactccaggctgggcaacaagagcgaaacttcatctcaaaaaaaaaaaaaaattaactctcatacatgtgagagaaaagtgaactcattttaatattaaagtagaacagttatcctcagcctgattcccactcctcttctagaacaggcttcttctcattaggctcatcttagagttgctgaaccaatgagtgcaaattttgtcattgccttttcagatttggagtttcacctactatggtggtttccagccttggctgcacatcattggaatcacctgagggatctttttacaaaacttcctagttcctgggatttgatcctccagagattctgatttaattggtctggggtgtggcccaaacatctgaatttttaaaagatccccaaggtgattctaatttgcagtcagtcagggttatgatcctctgataagggctgtggttcccaaacttgtatgtatattaaaatctcccagggatctttccaaacttccaagtgcagaccatgtccagaccagctgagtcatcacaatcactggaggtgggacacaggcgttggtaatattaaaatttccccggtgattcccatatgcagccagcattgagaagtacagtattatggtattagataatgccctttgattgtttttgggctggaagggagaagatgattgtcatttgttgagatgtaagtcttccaaccctttatcttcaaaatcacattggaaatttatagcttacaggggcatcattgtcactttcctaaggaatatatttcaaaatggcatgcccataaagtgcagtcatgaagctcccttagtacttgccaattaatgttagtgcaaaaggacaattgaaatgaaatacagctattatgtctgacacttaacaattttccatcaggtgattctatttcattaatacatgtatttccacattgtttctcattgtctctcttcaaaggagactaagcagggtggcagtgcccacatgtggcccagagccacacaatggaggaacatgtaaatatcctcaagtccatttgtgactgttagggacattcatgatacatggaggggagaggcctttgctctgaggatctacaaaaggaattgaaatatttcaggatattggtatttaccatttgcctttactgatacctttatacgtaaccaagccaaggaatatcagagagggctatactaaactgtttagtagtctgtctcctccaactagactgtaaggtttaagaggacaagagctatatcttggtcactgttgtatatgtaacacctagcacagtgtctgaaatatggcaggtgcttagataggcgatatagcatactggccaagcagagcagttttggagtcaggctgacctggcctaaatcctgactctatcacttacatgctctgtgatctaggacaagttacttgacctctccaatgctctttttaccacccatctccatgtaaaataaggataataatagcacttatctcatggagattgctgtgaccaattagtgaaacaatctgtgtatatataaacactttgcaaattgcttggcacatagcatgcatgaaatgggtgtcgttttttttttttttttttttgcgacagaatctcgctctgtcgcccaggctggagtgtggtggcaccatcttggctcactgcaacttccacctcctgggttcaggtgattcttctgcctcagtctcccgagtagctgggattacaggcatgcgccaccacgcctggctaattttgtaatgggtgtcattcttaatcatccgattatttgttgacaaataaatgaatgtcatagcctgctttcccttcccattattgagattaactggcaaaaataatttgtttcctgtaagttttcttctttttttttttttttgagatggagtctcactctgtcacccaggctggagtgcagtggcatgatcctggctcactgcaacctctgcctcccgggttcaggtgattctcctgcctcgcctcctgagtagctgggattacaggcatgtaccaccacgcccggctaatttttgtatttttagtagagatgggatgggatttcaccatgttggccaggctggtctcaaacgcctgacctcaagtgatccgcccacttcagcttcccaaagtgctgggattacaggcgtgagccactgcaccaggccaattttctgtgttttcaataattaattttaggcaagtcaaaccaaacacatcgcagagtcccttccctgttggtgtgggtgtttctcagcatttatgttttagtcaaatattacagcttttagtaaaaatttatatacggtttgaagaaaaatgaagcatagaaagcagacaaggaaggctatttctctcattttgtcaccttcataatgttggttgctaaaaataacctacttgtcaaatcattttgtactactgcgagaagtgctaatgtaagacatgttttctgaaaataactgtgatgaggcgtcttggattaagggctttggtacagaagtgatggagttcccttctgggtagagtggctcaggatcataacttgcttagaacacctactagcttaccctttcaactccttaagaggaaacctgtttgtaggattttttttgtaaactaaccaatctataaatgttgtatgggatcctgaattaaatcttgaacaacaacaacaaaaaggacattagtgaaaacaccgaagtctaaataaagtctgttgtctagtaactagtatgatgataatgttaatgtgatagttttgatcagtgtaccagaagatgagatgctaccgttaggggaagctaggtgaagggtatacatgaactttctgaactacagttacaactcttgagtaaatctaaaattatttcaaaatgcaaagttaaaagaaactaactatagtctttggaaaactaaatatactgattgaaagctaattctagaaaaaccaggtctggaaaggtgttaaggccacatctcgagggagagaattttactcactcagatacccagatatgtgctagatgtttgactgactgtaagtaccaaccctgacaaggtgacaagaggggtagtgtgcaacaattcttttacaaatatggaacttatagaagcctatcaaaaaaaaaatctagttcctttctttccatataagcaaggctagttcaaaacacagtggcccaactaaaagaggttcaatataagttattttttggttttttgttttttgaggtggcgtctcgctctgttgcccaggctgggtacagtgctgtgattatagctcactgcaacctcagtctcctgggctcaagtgacccttttttttcagcctcctgagtagctgggactacaggcatgtgccaacatgcctggctaatttttgatcgttagtagagatgaggtctcgctatgttgcccaggctggaaatgtaaattttcttaatctcccatcttagacttatttggtcggcttggagttaggaaggaatttctcactgtagtgccaaacctgaaatggtaattgtgtttgagcaagttccctgaacataagggggcgaggggaggaagaggaacgatccaggccatttttgttgatacataatagttgcacatattttttcatgtgatgtttcgatatatgcatacaatgtgtaatgatcagatcagggtaattgagatatttgttgcctcaaacattttttctttgttgggaatgtttaaactcttctagctgttttgaaatatacaataaatgattgttaactatagtcac

SEQ ID NO: 146 - DNA, 950 bp, Homo sapiens
attctttctcatattaggcatctaaagctcttggtattgacagataagcaagattcaactaaaatggaacttctaaagtaaatagtaaacttggggctcaatcctataccatcataactgacagctccacaacagtggtagagcccattcattccaaggaggactcagatgctagtgatcttcatcctgtctgccacttgtgaggatgaaaactggagtctgctgagtctgctttctagatatgagtagaccgaatgaagacatcctggcactggtatgtctcatctaccttatcaaatcgaagaacagtgggacgattttggttgtagattgtactctgtattaactatccaaataagacatttccttgggttgtcatcctatatgcagttttctctttttgtgtttgtgtttgtcagagttctccagagagacagaaccaacataaaggataaattatagatagatagatagatagatagatagatagatagatagatagatgagatgggacttattaggtgaattggctcacatggttatggaggctgagaaggcccctgataggctgtcagcaagcagaagaacctggaacccagcagcatggctgatcaagcctgaaagtttcaggatcagctaaaacaaatttgcctttctcctgactttttgttctctccatgccctcctatattaagagtggaacttggccattcagtccaccaactcacacaccaatcttctgctgaaacatcctcacaaacacatccagaaataatgctttaccaactctctaggtatcacttaatttagtcaagttcagataagaataaactgcatgagaaggagtagttctaaaaaaaatgattgttacttaaagtataataaaaaaagaaaaaaatggaaaatatgagctaacttagaatgcatcaagttttgacagattttgggtg

SEQ ID NO: 147 - DNA, 948 bp, Homo sapiens
ttataaaatcaagaagattagctgatttatatgatttgcttcaatatactgggcttgcaactggagaaggcctgctttccaagaaaaaaattgtctcaatcctataccatcataactgacagctccacaacagtggtagagcccattcattccaaggaggactcagatgctagtgatcttcatcctgtctgccacttgtgaggatgaaaactggagtctgctgagtctgctttctagatatgagtagaccgaatgaagacatcctggcactggtatgtctcatctaccttatcaaatcgaagaacagtgggacgattttggttgtagattgtactctgtattaactatccaaataagacatttccttgggttgtcatcctatatgcagttttctctttttgtgtttgtgtttgtcagagttctccagagagacagaaccaacataaaggataaattatagatagatagatagatagatagatagatagatagatagatagatgagatgggacttattaggtgaattggctcacatggttatggaggctgagaaggcccctgataggctgtcagcaagcagaagaacctggaacccagcagcatggctgatcaagcctgaaagtttcaggatcagctaaaacaaatttgcctttctcctgactttttgttctctccatgccctcctatattaagagtggaacttggccattcagtccaccaactcacacaccaatcttctgctgaaacatcctcacaaacacatccagaaataatgctttaccaactctctaggtatcacttaatttagtcaagttcagataagaataaactgcatgagaaggagtagttctaaaaaaaatgattgttacttaaagtataataaaaaaagaaaaaaatggaaaatatgagctaacttagaatgcatcaagttttgacagattttgggtg

SEQ ID NO: 148 - DNA, 316 bp, Homo sapiens
ttcctttcctctctcgttctctctctttctttccttttcttgttccactgaatagaatcttctgtaaaatgctgaacagaggtcatgagagtggacatctctgcctggttcctaattgtgtgagaagaaaaaggaaaacagcagagctgatggccaattggagggtcttcaagtgtcccactaccctttccattccatgatggagaaatgaggatgtaatttgcagtgaataataacctggatatagaacaggaggaagcatctccgaaggcagaggcagacaggcagtttggacaggacgtgcaaattgttcctt

SEQ ID NO: 149 - DNA, 2330 bp, Homo sapiens
tgcatttggacgtgtaagatagtagagaagggtctctacaatttaagtagcagagggataagacagcgcacctttcacttgagcttcaacatgggaaagggaaacgaagacccctatctccactgctcctccatccaatgttccactgaccagccccctttccaacagatctcctttacaggaaagggctcagatgagaagaaaccgttcaaaggaaaaggcaagaccgcctcttcccattccagtgagaagcacatacaaaggcaagtaggattagagccaaatccaaaaatccaaaagaggaggagaagtcccaggagaccaagcccaaagccagaaacagcactgctagattagggaactgtccagaagaggaacgcagcttgatgttaaaaaaaaaaaaaaaatcaaagtcctccactgctgtgcactacagtgaaatccaggagatctgtgatgcccaccataagggacattcgagggcttgcactgggcacagccagtggcacaggtctggggccctaggattccaatgaccggcacttggaaaaagcttggtgacctctgttggagctatgctggaggctacttatcaagacctagcccaggtgtgggcacagcaggtccattttccactgacctgagagcagctcacattgctgacttggatctgggggcctctgtgtgcccaggtgcagaccttctatgccattgccacccagggagcttaagtcttacctgctgagggttggcttgtctcagccacactgtctggtcctggggatagaggcctgaatagagaagctcacccttttttgggcatgatgtaactgagcatgtcagtggatcagatgaggcttgagctgagaggaccctggccctattcagcagaggatgcagctctgggaatgagaacaaggacctgctactgctcagatttttctagatgaccagcagtgacaatattagatgcactgtgttaataaatgacagaacatgaagaaatcataggaaataaatttgaacaatataatcagaatggtaagcttttttgtaaaaggccgatgctatagacaaattttatatttcatgttagatatggaggtctggtgacagtcatgcatttctatgtaatcaggaaaatattagaatgtgatcatatgagtttgcatattttagattgtagaaaagaaatgttacccaggctggaatgcagtgacacaatcttagctcactgcaacctccgcttcctgggttcaaacaattctcatgcctcagcctctcaagtagctgggactacaggcatataccaccatgcctggctatttttgttttttttttttttttgtattattagtacagacagagttttgtcacgttggccaggttggtctcgaactcaagtgatacgccagccttgacctcctaaagtgctgggattacaggcatgaaccgccttaccaagaaattgctcctcttttatttcagaataggttgtaggctctcactcttctagcctgaacccgtgaagtactaatatccaaaaaacattaatagcacttgctgtggaaaaatgattacacattttaaagtttgatataattatagtaaaattaccatgcaaggtgtttacttttaatatttttacaaaaaaattaagtaacgatatattaaatggtaaatgagtgtactcatttattcacctgcctcatgttttcattataaacatcctaaattaaatcctattgtatcttacacatttcaattgattgtattgtattgcaggatatggagatttcataatatactacaataaagtgtattttgttatatttaacatatattctacttgtattttatattgaggtcatacaatctttcattatttgttttaattatttggttgctttataattttcattatatgtaataatgtacattgatgttgtttggaattttaaatttcaagataattttgtcttactttcatatggaattagtgtttactatagatgtgaaaaagagaatgacttatctttatttctgtgtcatcctaaccctgacctccccactgcccatagctcttgtcgtagtcgggaaatcgtgttctgtcactccagtaaacggggcgattcgatgataccacacagatataaattgcagatgtagagcttttgttcaagaccagtgcaacggaaaaaaatcacaggcatgtgagtcacacaattttcgggttgtcagtgcttataaaaattatgcttaaactgtgctgtagaataagtctgaaacacccttacgtctattaaacaaatgcacatacctaaataacg

SEQ ID NO: 150 - DNA, 2360 bp, Homo sapiens
tttttctttatttgtttttcacttaacattgtatcaggaccatatcattaaaattttttgaacatttaatttttaatagctgcaaaataatcaggatataatgtgttataatttatttaattacttctttatttggacatttggttcaatttccacttcatctttgttacaaataatgggtaatgaccatctagatatatacatttttgtcatcttcacctcattgtttcctctgagttgatttctagaattggaactactgggttatttattcatttaatcattctgttacggtaggtagctagtcaggcatgagcagggcaggagaggccccccacccccaccaggaatgtcaggtgaccatcaggcggtggtcagactgttgttacactagttctctaaaataattggtcacagctggtgtcagggaaaggcagcctcctaatagatagaaaacacctgaaactggtgatcagcaggttcccagtaagatctaaggatttgggtgagtgggcacaggcatgcccattaagaggccaaatagcagcagttaattggtatatggcctcctaagtatatttgactggtaagggaagaacacttcaagtgagcgtgcatgtaactccagtaaagacactgcgcatgttcacctctcaagtgctagcaggccattgcgcatgcggacagcccacctccagggaagaatcagaggagaagggacggaaggcctcggaagtatgccaacatataaaaccctacctcaaaggtcaaatggggcacttgatctctcaactcgcctgctttgtcttcttccgagtgttctttccttcctttcattcctgttctaaagatttttaataaactttcacttctgctctaaaacttgcctcggcctctcctttttgccttatccctctcagttgaactcttctgaggaggcaagaattgaggttgcctcggacccgtatggattcatggctggtaacaattcctgcgacaaaaacattttcgaatgctaactttgcgctataaaacattttttccagttcagctgtttttaaagtttattcacaaagttatgcaaccatcaccactatctaattttaaacattttcaagtcctcagaaatacattctgctgcctcccttctccatacccattcaagtgtcactgtccattctgccttttcctcatcccctgtaaaccacagaaaccatgagctttccatttctagaatctgcctaccctggagattttatatatatatgtgcaataaaacgtttttaagtcttttgatacaaggtgtaaaattgctatccaaagtgactctgccaactttttgatgcttatgccaaacataactacctcttggtgtttctgccctcatgtagtccttttcctaatgaatagcatcaacctatgtaaaccaacatgtggttacagaaacacagactggtcataaaggcgatgatggcatctgctttgcttcctcttagatctcctgccctgggagaagccagctgccatatcatgagaacgtgtaagcatccttgaggagcggtccatgtggtaagtgaggtacagaaggctcctgccaagagccagcagggtcttgagttctccagtcaacaactgtaagcgtgagccattttgcaaacagatccttcattcctcacccagctttccagtgactgcagccctggccaacctcttgatggcctcctcatgagagctgatgagccaggaccacccagtgaagccattcctggattcgtgtccataatgtagaaccaatgggaggcccgagcttgttttcctgcaactggatggttccatcttccaaattctcattgagcttttgatggaaagagacggtaactcagtaggctcactttcctttctcctcaccacctccctatgcagagcatccagagccctgcctctgttactttaggatgtctccagaagtgtctcgaaagcaaggctttttcactcctctgcggtgagaaagctcattctgttcttctctactacgccagttctccctcgatgctgagtcccaggatgctgcttggggctgcttcagtgcagtcagaggtaccagtggccatcaggagaatatgtgggggtctatgcttcctctcttcccgatgattgctttccagcattgggagaaattctaagtaagcttttcctgaagtcctctgctgaccatcatcgtgttcttgtcccaggttgaagtgtgaagacagtctctttttccattttgtgacattttgctacctggaaccaaagcagcacaacttgtgagcagaagtctcccagggttccagaggggtagaccttcagttttggtctga

SEQ ID NO: 151 - DNA, 3060 bp, Homo sapiens
ttgcctttgtaaggagtctttttaaaaaagtataaacattttaaaattcatttttggaagagtctacacatcaatagacaacccttggtaggccccctatgagagactctcatttttaaatgcatttcttaaagtgcaatgtggttcatctggaatattccacattatggccatcataattctaaattatctgtagtatgattttgccatttttgtaagcagcttctgtgacctaatatttacacatgtaaaaggtagtcctatggagtattcaggtctttagaaattgaggatgaaatttttaggttgaatcttggctctcttagagccaagattaaagcccgaagaaagcaccgtgggcttgtgttgtgtaatgctttcatggcgtacctcattgcatgaaaatatccttgaagctggtgagcaacctaatgttagctagcccattctgttagcagcttatttttttcatggaagtcttattttttagtggagagcactgtaatagctttattttttttgagagacagagtctcactctgtcgcccaggctggagtgcagtggcacgatctcagttcacagcaacctccgaatcccaggtacaagtgattcttctttttcagccttccgggtagttgggattacaggtgtgcgccaccacactaggctaatttttgtatttttagtagagatagggtttcaccatgttggccaggctggtcttgaactcttgactgcctcggcctcccaaagtgctgggattacaggcatgagccactgcacccagccacagctgtaatagcttttaagttctcaaactgtgcccaccagtcaggttgtagctttggctctgagatccccttgaccaatttagccaatacttacccagttttgtctgacccagtcagtcccctgaggcctcccttactgaggcattcaagaaaaagaaaagaagaggaaagaaacccaaatacctaagatttttgaggagttcatgcctcctacaataactaccatttattgcaactgctgtcagttacctttttttttttctttttttctgagacggagtcttgctctgtcacccaggctagagtgcagtggcgcgatctcggctcacagttacctttaaaattgtagctctttcatgatccagagcttctcccaaagatagccaaaagaaaagaagacttagacaattccttgagagcttgcagcagtcaatacgctagctgtacatggggtacacccacatttctgtctggccatattcttgggggcttgacttaagaccgaaacaaataagcctctatgactttagccaagacatctccaaagtgggagcagaaagatgcagctcttaccagttacttgtcagccaccacaaacccaaaggccaagtgccttctcatagcacaaagaaactctggatttgaaagccaaaaaaaaaccaggagcgcaatgcaaaaggagcagagtctgacttgagagaaacttacttatgactctcagggctccatgaggatgacaggaaacctgaaaaggggtcagtggtgcttttcctgcatccattcctcaaagggtcttggggggtgatcagcagtgtactctgggtcccttcggggtcgccagaagtggcaaaagacaaaatcatagcaagtttagtttatttttatttttttgggacagagtcttgctctgtcgcccagggtggagtgcagtggcgcgatctcagctcagagcaacctccacctcccgggttcaagcaattctcttgcctcagcctcccgagtacctgagactgcaggcacgcaccactaaccccggctacttttttctatttttagtagagatggggtttcaccacgttagccaggatggtcttgatctcctgacctcatgagctgcccgcctcagcctcccatagtgctggaattacaggcttgagccactgtgcctggccagcaagtttagtttaaagatcttagttggctttatttgcgattccagaatcaggcaaccctttattctgtaaaatagaatgagtgtttcaaagacctgagcagatgtgtttggttttatagacagaaaagagctgaagaaagcagaaacagaaaacggaatgcggattgatagtttcgaagttacttttcttgtaaaagttaaagcagaggggacttcagtgtcatgccaactaaaactggcctatttggagatgtggctattttctctctctcctgatttcttgaaagttcagatgtataacttagcttcagtttggtgacatggaactttattacttattattttttgagatggagtcttgctctgttgcccaagctggagtgcggtggcacaatcttggctcactgcaacctctgcctccaggtttcaagccattctcctgcttcagcgttccaagtagttgggattacaggtggaatttcacttttgatggcattaagaggtgctattagcataatgtagaaccaatgggaggcccgagcttgttttcctgcaactggatggttccatcttccaaattctcattgagcttttgatggaaagagacggtaactcagtaggctcactttcctttctcctcaccacctccctatgcagagcatccagagccctgcctctgttactttaggatgtctccagaagtgtctcgaaagcaaggctttttcactcctctgcggtgagaaagctcattctgttcttctctactacgccagttctccctcgatgctgagtcccaggatgctgcttggggctgcttcagtgcagtcagaggtaccagtggccatcaggagaatatgtgggggtctatgcttcctctcttcccgatgattgctttccagcattgggagaaattctaagtaagcttttcctgaagtcctctgctgaccatcatcgtgttcttgtcccaggttgaagtgtgaagacagtctctttttccattttgtgacattttgctacctggaaccaaagcagcacaacttgtgagcagaagtctcccagggttccagaggggtagaccttcagttttggtctga

SEQ ID NO: 152 - DNA, 2300 bp, Homo sapiens
tttttctttatttgtttttcacttaacattgtatcaggaccatatcattaaaattttttgaacatttaatttttaatagctgcaaaataatcaggatataatgtgttataatttatttaattacttctttatttggacatttggttcaatttccacttcatctttgttacaaataatgggtaatgaccatctagatatatacatttttgtcatcttcacctcattgtttcctctgagttgatttctagaattggaactactgggttatttattcatttaatcattctgttacggtaggtagctagtcaggcatgagcagggcaggagaggccccccacccccaccaggaatgtcaggtgaccatcaggcggtggtcagactgttgttacactagttctctaaaataattggtcacagctggtgtcagggaaaggcagcctcctaatagatagaaaacacctgaaactggtgatcagcaggttcccagtaagatctaaggatttgggtgagtgggcacaggcatgcccattaagaggccaaatagcagcagttaattggtatatggcctcctaagtatatttgactggtaagggaagaacacttcaagtgagcgtgcatgtaactccagtaaagacactgcgcatgttcacctctcaagtgctagcaggccattgcgcatgcggacagcccacctccagggaagaatcagaggagaagggacggaaggcctcggaagtatgccaacatataaaaccctacctcaaaggtcaaatggggcacttgatctctcaactcgcctgctttgtcttcttccgagtgttctttccttcctttcattcctgttctaaagatttttaataaactttcacttctgctctaaaacttgcctcggcctctcctttttgccttatccctctcagttgaactcttctgaggaggcaagaattgaggttgcctcggacccgtatggattcatggctggtaacaattcctgcgacaaaaacattttcgaatgctaactttgcgctataaaacattttttccagttcagctgtttttaaagtttattcacaaagttatgcaaccatcaccactatctaattttaaacattttcaagtcctcagaaatacattctgctgcctcccttctccatacccattcaagtgtcactgtccattctgccttttcctcatcccctgtaaaccacagaaaccatgagctttccatttctagaatctgcctaccctggagattttatatatatatgtgcaataaaacgtttttaagtcttttgatacaaggtgtaaaattgctatccaaagtgactctgccaactttttgatgcttatgccaaacataactacctcttggtgtttctgccctcatgtagtccttttcctaatgaatagcatcaacctatgtaaaccaacatgtggttacagaaacacagactggtcataaaggcgatgatggcatctgctttgcttcctcttagatctcctgccctgggagaagccagctgccatatcatgagaacgtgtaagcatccttgaggagcggtccatgtggtaagtgaggtacagaaggctcctgccaagagccagcagggtcttgagttctccagtcaacaactgtaagcgtgagccattttgcaaacagatccttcattcctcacccagctttccagtgactgcagccctggccaacctcttgatggcctcctcatgagagctgatgagccaggaccacccagtgaagccattcctggattcgtgtccataatgtagaaccaatgggaggcccgagcttgttttcctgcaactggatggttccatctttctcctcaccacctccctatgcagagcatccagagccctgcctctgttactttaggatgtctccagaagtgtctcgaaagcaaggctttttcactcctctgcggtgagaaagctcattctgttcttctctactacgccagttctccctcgatgctgagtcccaggatgctgcttggggctgcttcagtgcagtcagaggtaccagtggccatcaggagaatatgtgggggtctatgcttcctctcttcccgatgattgctttccagcattgggagaaattctaagtaagcttttcctgaagtcctctgctgaccatcatcgtgttcttgtcccaggttgaagtgtgaagacagtctctttttccattttgtgacattttgctacctggaaccaaagcagcacaacttgtgagcagaagtctcccagggttccagaggggtagaccttcagttttggtctga

SEQ ID NO: 153 - DNA, 3000 bp, Homo sapiens
ttgcctttgtaaggagtctttttaaaaaagtataaacattttaaaattcatttttggaagagtctacacatcaatagacaacccttggtaggccccctatgagagactctcatttttaaatgcatttcttaaagtgcaatgtggttcatctggaatattccacattatggccatcataattctaaattatctgtagtatgattttgccatttttgtaagcagcttctgtgacctaatatttacacatgtaaaaggtagtcctatggagtattcaggtctttagaaattgaggatgaaatttttaggttgaatcttggctctcttagagccaagattaaagcccgaagaaagcaccgtgggcttgtgttgtgtaatgctttcatggcgtacctcattgcatgaaaatatccttgaagctggtgagcaacctaatgttagctagcccattctgttagcagcttatttttttcatggaagtcttattttttagtggagagcactgtaatagctttattttttttgagagacagagtctcactctgtcgcccaggctggagtgcagtggcacgatctcagttcacagcaacctccgaatcccaggtacaagtgattcttctttttcagccttccgggtagttgggattacaggtgtgcgccaccacactaggctaatttttgtatttttagtagagatagggtttcaccatgttggccaggctggtcttgaactcttgactgcctcggcctcccaaagtgctgggattacaggcatgagccactgcacccagccacagctgtaatagcttttaagttctcaaactgtgcccaccagtcaggttgtagctttggctctgagatccccttgaccaatttagccaatacttacccagttttgtctgacccagtcagtcccctgaggcctcccttactgaggcattcaagaaaaagaaaagaagaggaaagaaacccaaatacctaagatttttgaggagttcatgcctcctacaataactaccatttattgcaactgctgtcagttacctttttttttttctttttttctgagacggagtcttgctctgtcacccaggctagagtgcagtggcgcgatctcggctcacagttacctttaaaattgtagctctttcatgatccagagcttctcccaaagatagccaaaagaaaagaagacttagacaattccttgagagcttgcagcagtcaatacgctagctgtacatggggtacacccacatttctgtctggccatattcttgggggcttgacttaagaccgaaacaaataagcctctatgactttagccaagacatctccaaagtgggagcagaaagatgcagctcttaccagttacttgtcagccaccacaaacccaaaggccaagtgccttctcatagcacaaagaaactctggatttgaaagccaaaaaaaaaccaggagcgcaatgcaaaaggagcagagtctgacttgagagaaacttacttatgactctcagggctccatgaggatgacaggaaacctgaaaaggggtcagtggtgcttttcctgcatccattcctcaaagggtcttggggggtgatcagcagtgtactctgggtcccttcggggtcgccagaagtggcaaaagacaaaatcatagcaagtttagtttatttttatttttttgggacagagtcttgctctgtcgcccagggtggagtgcagtggcgcgatctcagctcagagcaacctccacctcccgggttcaagcaattctcttgcctcagcctcccgagtacctgagactgcaggcacgcaccactaaccccggctacttttttctatttttagtagagatggggtttcaccacgttagccaggatggtcttgatctcctgacctcatgagctgcccgcctcagcctcccatagtgctggaattacaggcttgagccactgtgcctggccagcaagtttagtttaaagatcttagttggctttatttgcgattccagaatcaggcaaccctttattctgtaaaatagaatgagtgtttcaaagacctgagcagatgtgtttggttttatagacagaaaagagctgaagaaagcagaaacagaaaacggaatgcggattgatagtttcgaagttacttttcttgtaaaagttaaagcagaggggacttcagtgtcatgccaactaaaactggcctatttggagatgtggctattttctctctctcctgatttcttgaaagttcagatgtataacttagcttcagtttggtgacatggaactttattacttattattttttgagatggagtcttgctctgttgcccaagctggagtgcggtggcacaatcttggctcactgcaacctctgcctccaggtttcaagccattctcctgcttcagcgttccaagtagttgggattacaggtggaatttcacttttgatggcattaagaggtgctattagcataatgtagaaccaatgggaggcccgagcttgttttcctgcaactggatggttccatctttctcctcaccacctccctatgcagagcatccagagccctgcctctgttactttaggatgtctccagaagtgtctcgaaagcaaggctttttcactcctctgcggtgagaaagctcattctgttcttctctactacgccagttctccctcgatgctgagtcccaggatgctgcttggggctgcttcagtgcagtcagaggtaccagtggccatcaggagaatatgtgggggtctatgcttcctctcttcccgatgattgctttccagcattgggagaaattctaagtaagcttttcctgaagtcctctgctgaccatcatcgtgttcttgtcccaggttgaagtgtgaagacagtctctttttccattttgtgacattttgctacctggaaccaaagcagcacaacttgtgagcagaagtctcccagggttccagaggggtagaccttcagttttggtctga

SEQ ID NO: 154 - DNA, 23 bp, Artificial Sequence
  primers
gccaagctccaagtcaatatagc

SEQ ID NO: 155 - DNA, 23 bp, Artificial Sequence
  EWS-FLI1 primer R
gaggccagaattcatgttattgc

SEQ ID NO: 156 - DNA, 21 bp, Artificial Sequence
  RPLP0 primers F
gaaactctgcattctcgcttc

SEQ ID NO: 157 - DNA, 20 bp, Artificial Sequence
  RPLP0 primers R
ggtgtaatccgtctccacag

SEQ ID NO: 158 - DNA, 21 bp, Artificial Sequence
  JUJE1 primer F
atactgggcttgcaactggag

SEQ ID NO: 159 - DNA, 21 bp, Artificial Sequence
  JUJE1 primer R
tcctccttggaatgaatgggc

SEQ ID NO: 160 - DNA, 20 bp, Artificial Sequence
  JUJE2 primer F
tggccaattggagggtcttc

SEQ ID NO: 161 - DNA, 24 bp, Artificial Sequence
  JUJE2 primer R
gcaaattacatcctcatttctcca

SEQ ID NO: 162 - DNA, 22 bp, Artificial Sequence
  JUJE3 primer F
acagcactgctagattagggaa

SEQ ID NO: 163 - DNA, 21 bp, Artificial Sequence
  JUJE3 primer R
cagtgcaagccctcgaatgtc

SEQ ID NO: 164 - DNA, 22 bp, Artificial Sequence
  JUJE10 primer F
actttcctttctcctcaccacc

SEQ ID NO: 165 - DNA, 24 bp, Artificial Sequence
  JUJE10 primer R
agacatcctaaagtaacagaggca

SEQ ID NO: 166 - protein, 9 aa, artificial sequence
  Chr2_lcl_ORF2
VLYPGYYSL

SEQ ID NO: 167 - protein, 9 aa, artificial sequence
  Chr2_lcl_ORF2
LQLAISSAV

SEQ ID NO: 168 - protein, 9 aa, artificial sequence
  Chr10_lcl_ORF19
FLSQELLPA

SEQ ID NO: 169 - protein, 9 aa, artificial sequence
  Chr10_lcl_ORF25
YISRWSLPI

SEQ ID NO: 170 - protein, 9 aa, artificial sequence
  Chr10_lcl_ORF13
SLCFCNHML

SEQ ID NO: 171 - protein, 9 aa, artificial sequence
  Chr10_lcl_ORF13
FCNHMLVYI

SEQ ID NO: 172 - protein, 9 aa, artificial sequence
  Chr10_lcl_ORF22
KLAESLWIA

SEQ ID NO: 173 - protein, 9 aa, artificial sequence
  CHR10_LCL_ORF22
SLWIAILHL

SEQ ID NO: 174 - protein, 9 aa, artificial sequence
  Chr10_lcl_ORF22
LWIAILHLV

SEQ ID NO: 175 - protein, 9 aa, artificial sequence
  Chr10_lcl_ORF17
YVWHKHQKV

SEQ ID NO: 176 - protein, 9 aa, artificial sequence
  Chr10_lcl_ORF17
RLKNVLLHI

SEQ ID NO: 177 - protein, 9 aa, artificial sequence
  Chr10_lcl_ORF13
AIIAFMTSL

SEQ ID NO: 178 - protein, 9 aa, artificial sequence
  Chr10_lcl_ORF21
RLYDQSVFL

SEQ ID NO: 179 - protein, 9 aa, artificial sequence
  Chr10_lcl_ORF23
YMLAYFRGL

SEQ ID NO: 180 - protein, 9 aa, artificial sequence
  Chr10_lcl_ORF14
KLAFENVFV

SEQ ID NO: 181 - protein, 9 aa, artificial sequence
  Chr1exA_lcl_ORF
MQFSLFVFV

SEQ ID NO: 182 - protein, 9 aa, artificial sequence
  Chr1exA_lcl_ORF
ALVCLIYLI

SEQ ID NO: 183 - protein, 9 aa, artificial sequence
  Chr1exB_lcl_ORF
MQFSLFVFV

SEQ ID NO: 184 - protein, 9 aa, artificial sequence
  Chr1exB_lcl_ORF
IITDSSTTV

SEQ ID NO: 185 - protein, 9 aa, artificial sequence
  Chr1exB_lcl_ORF
ALVCLIYLI

SEQ ID NO: 186 - protein, 9 aa, artificial sequence
  CHR3_lcl_ORF4
SMIPHRYKL

SEQ ID NO: 187 - protein, 9 aa, artificial sequence
  CHR3_lcl_ORF6
YLSRPSPGV

SEQ ID NO: 188 - protein, 9 aa, artificial sequence
  CHR3_lcl_ORF8
ILSYFHMEL

SEQ ID NO: 189 - protein, 9 aa, artificial sequence
  CHR3_lcl_ORF7
KLNPIVSYT

SEQ ID NO: 190 - protein, 9 aa, artificial sequence
  CHR3_lcl_ORF4
FLCHPNPDL

SEQ ID NO: 191 - protein, 9 aa, artificial sequence
  CHR3_lcl_ORF1
YLHCSSIQC

SEQ ID NO: 192 - protein, 9 aa, artificial sequence
  CHR3_lcl_ORF8
YLYFCVILT

SEQ ID NO: 193 - protein, 9 aa, artificial sequence
  CHR3_lcl_ORF7
QLIVLYCRI

SEQ ID NO: 194 - protein, 9 aa, artificial sequence
  CHR3_lcl_ORF3
VLLVQTEFC

SEQ ID NO: 195 - protein, 9 aa, artificial sequence
  CHR3_lcl_ORF2
GLSQPHCLV

SEQ ID NO: 196 - protein, 9 aa, artificial sequence
  CHR3_lcl_ORF11
KLFCKRPML

SEQ ID NO: 197 - protein, 9 aa, artificial sequence
  Chr2_lcl_ORF2
FLHHGMERV

SEQ ID NO: 198 - protein, 9 aa, artificial sequence
  Chr1exA_lcl_ORF4
LLGELAHMV

SEQ ID NO: 199 - protein, 9 aa, artificial sequence
  CHR3_lcl_ORF12
FLFFFFFCI

SEQ ID NO: 200 - protein, 9 aa, artificial sequence
  CHR3_lcl_ORF4
VLLSYGISV

SEQ ID NO: 201 - protein, 9 aa, artificial sequence
  CHR3_lcl_ORF8
RMTYLYFCV

1-19. (canceled)

20. A method for identifying tumor specific neoantigenic peptides which comprises:
i. identifying transcripts from one or more samples isolated from a tumor driven by a transcription factor fusion and obtained from one or more subjects,
which transcription is specifically positively regulated by said transcription factor fusion,
which are specifically associated with the transcription-fusion tumor type, and optionally
which are encoded by neogenes that originate from intergenic or intronic regions of the genome,
ii. identifying open reading frame (ORF) sequences from the transcripts of step (i), optionally wherein said ORF sequences are specifically expressed in a tissue (or cell) sample from said transcription factor fusion-driven tumor.

21. A tumor specific neoantigenic peptide, wherein said tumor is associated with a transcription factor fusion, and wherein said peptide
i) is encoded by a part of an (ORF) sequence from a neotranscript wherein:
a. its expression is regulated by a transcription factor fusion as evidenced by expression in cell line wherein the expression of said transcription factor fusion is made inducible,
b. it is specifically associated with the fusion-driven tumor type,
c. it is are encoded by genome regions having binding motifs involved in promoter regulation such as a poly GGAA motif and/or histone marks activation, such as H3K27ac and H3K4me3 histone, located at 5 kb or less of the TSS.
ii) is expressed at a higher level or frequency in a sample from said tumor compared to normal tissue sample.

22. The tumor specific neoantigenic peptide according to claim 21 wherein the aberrant fusion transcription factor is encoded by any one of the genes selected from PAX3-FOXO1, PAX7-FOXO1, ASPSCR1-TFE3, AHRR-NCOA2, EWSR1-CREB1, EWSR1-ATF1, FUS-ATF1, EWSR1-CREB1, COL1A1-PDGFB, EWSR1-WT1, WWTR1-CAMTA1, TFE3-YAP1, EWSR1-FLI1, EWSR1-ERG, EWSR1 fusion with various ETS partners such as ETV1 FEV and ETV4, FUS-ERG, EWSR1-NFATC2, CIC-DUX4, BCOR-CCNB3, EWSR1-NR4A3, TAF15-NR4A3, TCF12-NR4A3, TFG-NR4A3, ETV6-NTRK3, ALK-TPM4, ALK-TPM3, ALK-CLTC, ALK-RANBP2, ALK-ATIC, ALK-SEC31A, ALK-CARS, PLAF fusions, HMGA2 fusions, HMGA1 fusions, C-MKL2, f95-MKL2, FUS-CREB3L2, EWSR1-ZNF444, EWSR1-PBX1, EWSR1-POU5F1, FUS-DDIT3, EWSR1-DDIT3, EWS-CHOP, EWS-CHN, TGFBR3-MGEA5, TGFBR3-MGEA5, MYH9-USP6, PHF1 fusions, ACTB-GLI1, FUS-CREB3L1, NAB2-STAT6, NCOA2-SRF, NCOA2-TEAD1, SS18-SSX1, SS18-SSX2, SS18-SSX4, and CSF1-COL6A3, preferably wherein the aberrant fusion transcription factor is encoded by EWSR1-FLI1.

23. The tumor specific neoantigenic peptide according to claim 21, which is encoded by a part of an open reading frame (ORF) of one of the sequences selected from the group comprising SEQ ID No 1-145 and the transcripts identified in table 9.

24. The tumor specific neoantigenic peptide according to claim 21, wherein said peptide comprises at least 8 amino acids, in particular 8 or 9 amino acids and binds at least one MHC class I molecule of a subject or in particular from 13 to 25 amino acids and binds at least one MHC class II of a subject; optionally wherein the neoantigenic peptides are defined in SEQ ID NO:166-201.

25. A population of autologous dendritic cells or antigen presenting cells that have been pulsed with one or more of the peptides according to claim 21 or transfected with a polynucleotide encoding one or more of the peptides according to claim 21.

26. A vaccine or immunogenic composition capable of inducing a specific T-cell response comprising
a) one or more neoantigenic peptides according to claim 21; and/or
b) one or more polynucleotides encoding a neoantigenic peptide according to claim 21, optionally linked to a heterologous regulatory control nucleotide sequence.

27. An antibody, or an antigen-binding fragment thereof, a T cell receptor (TCR), or a chimeric antigen receptor (CAR) that specifically binds a neoantigenic peptide according to claim 21, optionally in association with an MHC molecule, with a Kd affinity of about 10⁻⁶ M or less.

28. A T cell receptor according to claim 27, wherein said T cell receptor is made soluble and fused to an antibody fragment directed to a T cell antigen, optionally wherein the targeted antigen is CD3 or CD16.

29. An antibody according to claim 27, wherein said antibody is a multispecific antibody that further targets at least an immune cell antigen, optionally wherein the immune cell is a T cell, a NK cell or a dendritic cell, optionally wherein the targeted antigen is CD3, CD16, CD30 or a TCR.

30. A polynucleotide encoding the neoantigenic peptide according to claim 21.

31. A vector comprising the polynucleotide of claim 30.

32. An immune cell that specifically binds to one or more neoantigenic peptides according to claim 21, optionally wherein the immune cell is an allogenic or autologous cell selected from T cell, NK cell, CD4+/CD8+, TILs/tumor derived CD8 T cells, central memory CD8+ T cells, Treg, MAIT, and Yδ T cell.

33. A T cell, which comprises a T cell receptor that specifically binds one or more neoantigenic peptides according to claim 21.

34. A method of treatment of a cancer associated with a transcription factor fusion in a subject in need thereof, comprising the administration of a vaccine or immunogenic composition comprising:
a) one or more neoantigenic peptides according to claim 21 or one or more polynucleotides encoding said neoantigenic peptides, optionally linked to a heterologous regulatory control nucleotide sequence.

35. The method according to claim 34, wherein the cancer is Ewing sarcoma.

36. The method according to claim 34, comprising the administration of the vaccine or immunogenic composition in combination with at least one further therapeutic agent, optionally wherein the therapeutic agent is a chemotherapeutic agent or an immunotherapeutic agent.

37. A method of treatment of a cancer associated with a transcription factor fusion comprising the administration of the antibody or the antigen-binding fragment thereof, the multispecific antibody, the TCR or the CAR according to claim 27 to a subject in need thereof.

38. A method of treatment of a cancer associated with a transcription factor fusion comprising the administration of the polynucleotide according to claim 30.

39. A method of treatment of a cancer associated with a transcription factor fusion comprising the administration of a population of the immune cells according to claim 32 to a subject in need thereof.

40. A vaccine or immunogenic composition capable of inducing a specific T-cell response comprising
a) a population of antigen presenting cells according to claim 25.

41. A polynucleotide encoding the antibody, the CAR or the TCR according to claim 27.

42. A T cell, which comprises a TCR or a CAR according to claim 27.

43. A method of treatment of a cancer associated with a transcription factor fusion in a subject in need thereof, comprising the administration of a vaccine or immunogenic composition comprising:
a) a population of antigen presenting cells according to claim 25.
